(19) United States
(12) Patent Application Publication
(10) Pub. No.: US 2007/0015173 A1
(43) Pub. Date: Jan. 18, 2007

(54) Polypeptide nucleic sequences exported from mycobacteria, vectors comprising same and uses for diagnosing and preventing tuberculosis

(75) Inventors: Brigitte Gicquel, Paris (FR); Denis Portnoi, Paris (FR); Eng-Mong Lim, Paris (FR); Vladimir Pelicic, Paris (FR); Agnes Guigueno, Arras (FR); Yves Goguet De La Salmoniere, Paris (FR)

Correspondence Address: FINNEGAN, HENDERSON, FARABOW, GARRETT & DUNNER;LLP, 901 NEW YORK AVENUE, NW, WASHINGTON, DC, 20001-4413, US

(73) Assignee: INSTITUT PASTEUR

(21) Appl. No.: 11/329,260

(22) Filed: Jan. 11, 2006

Related U.S. Application Data
(62) Division of application No. 09/855,604, filed on May 16, 2001.
Application No. 09/855,604 is a continuation of application No. 09/485,536, now abandoned.

(30) Foreign Application Priority Data
Aug. 14, 1997 (FR) 97/10,404
Sep. 11, 1997 (FR) 97/11,325

(51) Int. Cl. C12Q 1/68; G01N 33/554; C07H 21/04; C12N 1/21; C07K 14/35; C12N 15/74; G01N 33/569

(52) U.S. Cl. 435/6; 435/471; 435/252.3; 536/23.7; 530/350; 435/7.32; 530/388.4

(57) ABSTRACT

Purified polynucleotides and polypeptides, and cells of M. smegmatis, M. bovis, M. bovis BCG, or M. africanum are provided.

[0001] The subject of the invention is novel recombinant screening, cloning and/or expression vectors which replicate in mycobacteria. Its subject is also a set of sequences encoding exported polypeptides which are detected by fusions with alkaline phosphatase and whose expression is regulated (induced or repressed) or constitutive during the ingestion of mycobacteria by macrophages. The invention also relates to a polypeptide, called DP428, of about 12 kD which corresponds to an exported protein found in mycobacteria belonging to the Mycobacterium tuberculosis complex. The invention also relates to a polynucleotide comprising a sequence encoding this polypeptide. It also relates to the use of the polypeptide or of fragments thereof and of the polynucleotides encoding the latter (or alternatively the polynucleotides complementary to the latter) for the production of means for detecting in vitro or in vivo the presence of a mycobacterium belonging to the Mycobacterium tuberculosis complex in a biological sample or for the detection of reactions of the host infected with these bacterial species. The invention finally relates to the use of the polypeptide or of fragments thereof as well as of the polynucleotides encoding the latter as means intended for the preparation of an immunogenic composition which is capable of inducing an immune response directed against the mycobacteria belonging to the Mycobacterium tuberculosis complex, or of a vaccine composition for the prevention and/or treatment of infections caused by mycobacteria belonging to said complex, in particular tuberculosis.

[0002] The aim of the present invention is also to use these sequences (polypeptide and polynucleotide sequences) as target for the search for novel inhibitors of the growth and multiplication of mycobacteria and of their maintenance in the host, it being possible for these inhibitors to serve as antibiotics.

[0003] The genus Mycobacterium, which comprises at least 56 different species, includes major human pathogens such as M. leprae and M. tuberculosis, the agents responsible for leprosy and tuberculosis, which remain serious public health problems worldwide.

[0004] Tuberculosis continues to be a public health problem in the world. At present, this disease is the cause of 2 to 3 million deaths in the world and about 8 million new cases are observed each year (Bouvet, 1994). In developed countries, M. tuberculosis is the most common cause of mycobacteria infections. In France, about 10,000 new cases appear per year and, among the notifiable diseases, it is tuberculosis which comprises the highest number of cases. Vaccination with BCG (Bacille Calmette-Guérin), an avirulent strain which is derived from M. bovis and which is widely used as a vaccine against tuberculosis, is far from being effective in all populations. This efficacy varies from about 80% in western countries such as England, to 0% in India (results of the last vaccination trial in Chingleput., published in 1972 in Indian J. Med. Res.). Furthermore, the appearance of M. tuberculosis strains which are resistant to antituberculars and the increased risk in immunosuppressed patients, patients suffering from AIDS, of developing tuberculosis, make the development of rapid, specific and reliable methods for the diagnosis of tuberculosis and the development of novel vaccines necessary. For example, an epidemiological study carried out in Florida, and of which the results were published in 1993 in AIDS therapies, showed that 10% of the AIDS patients are affected by tuberculosis at the time of the AIDS diagnosis or 18 months before it. In these patients, tuberculosis appears in 60% of cases in a form which is disseminated and therefore nondetectable by conventional diagnostic criteria such as pulmonary radiography or the analysis of sputum.

[0005] Currently, a certainty on the diagnosis provided by the detection of bacilli which can be cultured in a sample obtained from a patient is obtained in only less than half of the tuberculosis cases, even in the case of pulmonary tuberculosis. The diagnosis of tuberculosis and of the other related mycobacteria is therefore difficult to carry out for various reasons: mycobacteria are often present in a small quantity, their generation time is very long (24 h for M. tuberculosis) and they are difficult to culture (Bates et al., 1986).

[0006] Other techniques can be used in clinical medicine to identify a mycobacterial infection:

[0007] a) The direct identification of microorganisms under a microscope; this technique is rapid, but does not allow the identification of the mycobacterial species observed and lacks sensitivity (Bates, 1979).

[0008] Cultures, when they are positive, have a specificity approaching 100% and allow the identification of the mycobacterial species isolated; however, as specified above, the growth of mycobacteria in vitro is long (can only be carried out in 3 to 6 weeks of repeated cultures (Bates, 1979; Bates et al., 1986)) and expensive.

[0009] b) Serological techniques are found to be useful under certain conditions, but their use is sometimes limited by their low sensitivity and/or specificity (Daniel et al., 1987).

[0010] c) The presence of mycobacteria in a biological sample can also be determined by molecular hybridization with DNA or RNA using oligonucleotide probes which are specific for the sequences tested for (Kiehn et al., 1987; Roberts et al., 1987; Drake et al., 1987). Several studies have shown the advantage of this technique for the diagnosis of mycobacterial infections. The probes used consist of DNA, ribosomal RNA or DNA fragments from mycobacteria which are obtained from gene banks. The principle of these techniques is based on the polymorphism of the nucleotide sequences of the fragments used or on the polymorphism of the adjacent regions. In all cases, they require the use of cultures and are not directly applicable to biological samples.

[0011] The low quantity of mycobacteria present in a biological sample and consequently the low quantity of target DNA to be detected in this sample can require the use of a specific amplification in vitro of the target DNA before its detection with the aid of the nucleotide probe and using in vitro amplification techniques such as PCR (polymerase chain reaction). The specific amplification of the DNA by the PCR technique can constitute the first stage of a method for detecting the presence of a mycobacterial DNA in a biological sample, the actual detection of the amplified DNA being carried out in a second stage with the aid of an oligonucleotide probe capable of specifically hybridizing with the amplified DNA.

[0012] A test for the detection of mycobacteria belonging to the Mycobacterium tuberculosis complex, by sandwich hybridization (test using a capture probe and a detection probe) was described by Chevrier et al. in 1993. The Mycobacterium tuberculosis complex is a group of mycobacteria which comprises M. bovis-BCG, M. bovis, M. tuberculosis, M. africanum and M. microti.

[0013] A method for the detection of low quantities of mycobacteria, belonging to the tuberculosis complex, by gene amplification and direct hybridization on biological samples has been developed. Said method uses the insertion sequence IS6110 (European Patent EP 0,490,951 B1). Thierry et al. described in 1990 a sequence which is specific to the Mycobacterium tuberculosis complex and which is called IS6110. Some authors have proposed specifically amplifying the DNA obtained from Mycobacterium using nucleic primers in an amplification method, such as the polymerase chain reaction (PCR). Patel et al. described in 1990 the use of several nucleic primers chosen from a sequence known as a probe in the identification of M. tuberculosis. However, the length of the fragments obtained using these primers was different from the expected theoretical length and several fragments of variable size were obtained. Furthermore, the authors observed the absence of hybridization of the amplified products with the plasmid which served to determine the primers. These results indicate that these primers might not be appropriate in the detection of the presence of M. tuberculosis in a biological sample and confirm the critical nature of the choice of the primers. The same year, J. L. Guesdon and D. Thierry described a method for the detection of M. tuberculosis, having a high sensitivity, by amplification of an M. tuberculosis DNA fragment located within the IS6110 sequence (European Patent EP 461,045) with the aid of primers generating amplified DNA fragments of constant length, even when the choice of the primers led to the amplification of long fragments (of the order of 1000 to 1500 bases) where the risk of interruption of the polymerization is high because of the effects of the secondary structure of the sequence. Other primers specific for the IS6110 sequence are described in European Patent No. EP-0,490,951.

[0014] The inventors have shown (unpublished results) that some clinical isolates of Mycobacterium tuberculosis lacked the insertion sequence IS6110 and could therefore not be detected with the aid of oligonucleotides specific for this sequence which could thus lead to false-negative diagnostic results. These results confirm a similar observation made by Yuen et al. in 1993. The impossibility of detecting these pathogenic strains which are potentially present in a biological sample collected from a patient is thus likely to lead to diagnostic difficulties or even to diagnostic errors. The availability of several sequences specific for the tubercule bacillus, within which primers appropriate for amplification will be chosen, is important. The DP428 sequence described here may be used.

[0015] M. bovis and M. tuberculosis, the causative agents of tuberculosis, are facultative intracellular bacteria.

[0016] These agents have developed mechanisms to ensure their survival and their replication inside macrophage, one of the cell types which is supposed to eradicate invasion by microorganisms. These agents are capable of modulating the normal development of their phagosome and of preventing them from becoming differentiated into an acidic compartment rich in hydrolase (Clemens, 1979; Clemens et al., 1996; Sturgill-Koszycki et al., 1994 and Xu et al., 1994). However, this modulation is only possible if the bacterium is alive inside the phagosome, suggesting that compounds which are actively synthesized and/or secreted inside the cell are part of this mechanism. Exported proteins are probably involved in this mechanism. Despite major health problems linked to these pathogenic organisms, little is known on their exported and/or secreted proteins. SDS-PAGE analyses of M. tuberculosis culture filtrate show at least 30 secreted proteins (Altschul et al., 1990; Nagal et al., 1991 and Young et al., 1992). Some of them have been characterized, their genes cloned and sequenced (Borremans et al., 1989; Wiker et al., 1992 and Yamaguchi et al., 1989). Others, although being immunodominant antigens of major importance for inducing a protective immunity (Anderson et al., 1991 and Orme et al., 1993), have not been completely identified. In addition, it is probable that many exported proteins remain attached to the cell membrane and are consequently not present in the culture supernatants. It has been shown that the proteins located at the outer surface of various pathogenic bacteria, such as the 103 kDa invasin of Yersina Pseudotuberculosis (Isberg et al., 1987) or the 80 kDa internalin of Listeria monocytogenes (Gaillard et al., 1991 and Dramsi et al., 1997) play an important role in the interactions with the host cells and, consequently, in the pathogenicity as well as in the induction of protective responses. Thus, a protein which is bound to the membrane would be important for the M. tuberculosis infection as well as for the induction of a protective response against this infection. These proteins could certainly be of interest for the preparation of vaccines.

[0017] Recently, the adaptation, to mycobacteria, of a genetic methodology for the identification and the phenotypic selection of export proteins has been described (Lim et al., 1995). This method uses E. coli periplasmic alkaline phosphatase (PhoA). A plasmid vector was constructed which allows the fusion of genes between a truncated PhoA gene and genes encoding exported proteins (Manoil et al., 1990).

[0018] Using this method, it has been possible to identify an M. tuberculosis gene (erp (Berthet et al., 1995)) exhibiting homologies with a 28 kDa exported protein of M. leprae, which is a frequent target of humoral responses of the lepromatous form of leprosy. A protein having amino acid motifs which are characteristic of plant desaturase (des) has also been characterized by the technique of fusion with PhoA.

[0019] However, this genetic method for identifying exported proteins does not make it possible to easily evaluate the intracellular expression of the corresponding genes. Such an evaluation is of crucial importance both for selecting good candidate vaccines and for understanding the interactions between bacteria and their host cells. The induction of the expression of virulence factor through pathogenic target cell contact has been described. It is the case, for example, for the Yersinia pseudotuberculosis Yops virulence factors (Petersson et al., 1996). Shigella, upon contact with the target cells, releases the Ipa proteins into the culture medium, and Salmonella synthesizes novel surface structures.

[0020] Taking into account the preceding text, a great need currently exists for developing novel vaccines against pathogenic microbacteria as well as novel specific, reliable and rapid diagnostic tests. These developments require the designing of even more efficient specific tools which make it possible, on the one hand, to isolate or to obtain sequences of novel specific, in particular immunogenic, polypeptides, and, on the other hand, to better understand the mechanism of the interactions between bacteria and their host cells such as in particular the induction of the expression of virulence factor. This is precisely the object of the present invention.

[0021] The inventors have defined and produced, for this purpose, novel vectors allowing the screening, cloning and/or expression of mycobacterial DNA sequences so as to identify, among these sequences, nucleic acids encoding proteins of interest, preferably exported proteins, which may be located on the bacterial membrane, and/or secreted proteins, and to identify among these sequences those which are induced or repressed during infection (intracellular growth).

### DESCRIPTION

[0022] The present invention describes the use of the reporter gene phoA in mycobacteria. It makes it possible to identify systems for expression and export in a mycobacterial context. Many genes are only expressed in such a context, which shows the advantage of the present invention. During the cloning of DNA segments of strains of the M. tuberculosis complex fused with phoA into another mycobacterium such as M. smegmatis, the beginning of the gene, its regulatory regions and its regulator will be cloned, which will make it possible to observe a regulation. If this regulation is positive, the cloning of the regulator will constitute an advantage for observing the expression and the export.

[0023] In the context of the invention, mycobacterium is understood to mean all the mycobacteria belonging to the various species listed by Wayne L. G. and Kubica G. P. (1980). Family Mycobacteriaceae in Bergey's manual of systematic bacteriology, J. P. Butler Ed. (Baltimore USA: Williams and Wilkins P. 1436-1457).

[0024] In some cases, the cloned genes are subjected in their original host to a negative regulation which makes the observation of the expression and of the export difficult in the original host. In this case, the cloning of the gene in the absence of its negative regulator, into a host not containing it, will constitute an advantage.

[0025] The invention also relates to novel mycobacterial polypeptides and to novel mycobacterial polynucleotides which may have been isolated by means of the preceding vectors and which are capable of entering into the preparation of compositions for the detection of a microbacterial infection, or for the protection against an infection caused by mycobacteria or for the search for inhibitors as is described above for DP428.

[0026] The subject of the invention is therefore a recombinant screening, cloning and/or expression vector, characterized in that it replicates in mycobacteria and in that it contains:

[0027] 1) a replicon which is functional in mycobacteria;

[0028] 2) a selectable marker;

[0029] 3) a reporter cassette comprising:
[0030] a) a multiple cloning site (polylinker),
[0031] b) optionally a transcription terminator which is active in mycobacteria, upstream of the polylinker,
[0032] c) a coding nucleotide sequence which is derived from a gene encoding a protein expression, export and/or secretion marker, said nucleotide sequence lacking its initiation codon and its regulatory sequences, and
[0033] d) a coding nucleotide sequence derived from a gene encoding a marker for the activity of promoters which are contained in the same fragment, said nucleotide sequence lacking its initiation codon. Optionally, the recombinant vector also contains a replicon which is functional in E. coli.

[0034] Preferably, the export and/or secretion marker is placed in the same orientation as the promoter activity marker.

[0035] Preferably, the recombinant screening vector according to the invention comprises, in addition, a transcription terminator placed downstream of the promoter activity marker, which is likely to allow the production of short transcripts which are found to be more stable and which consequently allow a higher level of expression of the products of translation.

[0036] The export and/or secretion marker is a nucleotide sequence whose expression, followed by export and/or secretion, depends on the regulatory elements which control its expression.

[0037] “Sequences or elements for regulating the expression of the production of polypeptides and its location” is understood to mean a transcriptional promoter sequence, a sequence comprising the ribosome-binding site (RBS), the sequences responsible for export and/or secretion such as the sequence termed signal sequence.

[0038] A first advantageous export and/or expression marker is a coding sequence derived from the phoA gene. Where appropriate, it is truncated such that the alkaline phosphatase activity is nevertheless capable of being restored when the truncated coding sequence is placed under the control of a promoter and of appropriate regulatory elements.

[0039] Other exposure, export and/or secretion markers may be used. There may be mentioned, by way of examples, a sequence of the gene for β-agarase, for the nuclease of a staphylococcus or for a β-lactamase.

[0040] Among the advantageous markers for the activity of promoters which are contained in the same fragment, a coding sequence derived from the firefly luciferase luc gene, provided with its initiation codon, is preferred.

[0041] Other markers for the activity of promoters which are contained in the same fragment may be used. There may be mentioned, by way of examples, a sequence of the gene for GFP (Green Fluorescent Protein).

[0042] The transcription terminator should be functional in mycobacteria. An advantageous terminator is, in this regard, the T4 coliphage terminator (tT4). Other appropriate terminators for carrying out the invention may be isolated using the technique presented in the examples, for example by means of an “omega” cassette (Prentki et al., 1984).

[0043] A vector which is particularly preferred for carrying out the invention is a plasmid chosen from the following plasmids which have been deposited at the CNCM (Collection Nationale de Cultures de Microorganismes, rue de Docteur Roux, 75724 Paris cedex 15, France):

[0044] a) pJVEDa which was deposited at the CNCM under the No. I-1797, on Dec. 12, 1996,

[0045] b) pJVEDb which was deposited at the CNCM under the No. I-1906, on 25 Jul. 1997,

[0046] c) pJVEDc which was deposited at the CNCM under the No. I-1799, on Dec. 12, 1996.

[0047] For the selection or the identification of mycobacterial nucleic acid sequences encoding polypeptides which are capable of being incorporated into immunogenic or antigenic compositions for the detection of an infection, or which are capable of inducing or repressing a mycobacterial virulence factor, the vector of the invention will comprise, at one of the multiple cloning sites of the polylinker, a nucleotide sequence of a mycobacterium in which the detection is carried out of the presence of sequences corresponding to exported and/or secreted polypeptides which may be induced or repressed during the infection, or alternatively expressed or produced constitutively, their associated promoter and/or regulatory sequences which are capable of allowing or promoting the export and/or the secretion of said polypeptides of interest, or all or part of the genes of interest encoding said polypeptides.

[0048] Preferably, this sequence is obtained by physical fragmentation or by enzymatic digestion of the genomic DNA or of the DNA which is complementary to an RNA of a mycobacterium, preferably M. tuberculosis or chosen from M. africanum, M. bovis, M. avium or M. leprae.

[0049] The vectors of the invention may indeed also be used to determine the presence of sequences of interest, preferably corresponding to exported and/or secreted proteins, and/or capable of being induced or repressed or produced constitutively during the infection, in particular during phagocytosis by the macrophages, and, according to what was previously disclosed, in mycobacteria such as M. africanum, M. bovis, M. avium or M. leprae whose DNA or cDNA will have been treated by physical fragmentation or with defined enzymes.

[0050] According to a first embodiment of the invention, the enzymatic digesion of the genomic DNA or of the complementary DNA is carried out using M. tuberculosis.

[0051] Preferably, this DNA is digested with an enzyme such as Sau3A, BcII or BglII.

[0052] Other digestive enzymes such as ScaI, ApaI, SacI or KpnI or alternatively nucleases or polymerases can naturally be used as long as they allow the production of fragments whose ends can be inserted into one of the cloning sites of the polylinker of the vector of the invention.

[0053] Where appropriate, the digestions with various enzymes will be carried out simultaneously.

[0054] Recombinant vectors which are preferred for carrying out the invention are chosen from the following recombinant vectors which have been deposited at the CNCM:

[0055] a) p6D7 which was deposited on 28 Jan. 1997 at the CNCM under the No. I-1814,

[0056] b) p5A3 which was deposited on 28 Jan. 1997 at the CNCM under the No. I-1815,

[0057] c) p5F6 which was deposited on 28 Jan. 1997 at the CNCM under the No. I-1816,

[0058] d) p2A29 which was deposited on 28 Jan. 1997 at the CNCM under the No. I-1817,

[0059] e) pDP428 which was deposited on 28 Jan. 1997 at the CNCM under the No. I-1818,

[0060] f) p5B5 which was deposited on 28 Jan. 1997 at the CNCM under the No. I-1819,

[0061] g) p1C7 which was deposited on 28 Jan. 1997 at the CNCM under the No. I-1820,

[0062] h) p2D7 which was deposited on 28 Jan. 1997 at the CNCM under the No. I-1821,

[0063] i) p1B7 which was deposited on 31 Jan. 1997 at the CNCM under the No. I-1843,

[0064] j) pJVED/M. tuberculosis which was deposited on 25 Jul. 1997 at the CNCM under the No. I-1907,

[0065] k) pM1C25 which was deposited on 4 Aug. 1998 at the CNCM under the No. I-2062.

[0066] Among those which are most preferred, the recombinant vector pDP428 which was deposited on 28 Jan. 1997 at the CNCM under the No. I-1818, and the vector pM1C25 which was deposited on 4 Aug. 1998 at the CNCM under the No. 1-2062 are preferred.

[0067] The subject of the invention is also a method of screening nucleotide sequences derived from mycobacteria in order to determine the presence of sequences corresponding to exported and/or secreted polypeptides which may be induced or repressed during the infection, their associated promoter and/or regulatory sequences which are capable in particular of allowing or promoting the export and/or secretion of said polypeptides of interest, or all or part of genes of interest encoding said polypeptides, characterized in that it uses a recombinant vector according to the invention.

[0068] The invention also relates to a method of screening, according to the invention, characterized in that it comprises the following steps:

[0069] a) physical fragmentation of the mycobacterial DNA sequences or their digestion with at least one defined enzyme and recovery of the fragments obtained;

[0070] b) insertion of the fragments obtained in step a) into a cloning site, which is compatible, where appropriate, with the enzyme of step a), of the polylinker of a vector according to the invention;

[0071] c) if necessary, amplification of said fragments contained in the vector, for example by replication of the latter after insertion of the vector thus modified into a defined cell, preferably E. coli;

[0072] d) transformation of the host cells with the vector amplified in step c), or in the absence of amplification, with the vector of step b);

[0073] e) culture of the transformed host cells in a medium allowing the detection of the export and/or secretion marker, and/or of the promoter activity marker which is contained in the vector;

[0074] f) detection of the host cells which are positive (positive colonies) for the expression of the export and/or secretion marker, and/or of the promoter activity marker;

[0075] g) isolation of the DNA from the positive colonies and insertion of this DNA into a cell which is identical to that in step c);

[0076] h) selection of the inserts contained in the vector, allowing the production of clones which are positive for the export and/or secretion marker, and/or for the promoter activity marker;

[0077] i) isolation and characterization of the mycobacterial DNA fragments contained in these inserts.

[0078] In one of the preferred embodiments of the screening method according to the invention, the host cells, detected in step f), which are positive for the export and/or secretion marker are, optionally in a second stage, tested for the capacity of the selected nucleotide insert to stimulate the expression of the promoter activity marker when said host cells are phagocytosed by macrophage-type cells.

[0079] More specifically, the stimulation of the expression of the promoter activity marker in host cells placed in axenic culture (host cells alone in culture) is compared with the stimulation of the expression of the promoter activity marker in host cells cultured in the presence of macrophages and which are thus phagocytosed by the latter.

[0080] The selection of host cells which are positive for the promoter activity marker can be carried out immediately after step e) of the method of screening described above, or alternatively after any one of steps f), g), h) or i), that is to say once the host cells have been positively selected for the export and/or selection marker.

[0081] The use of this method allows the construction of DNA libraries comprising sequences corresponding to polypeptides which are capable of being exported and/or secreted, and/or which are capable of being induced or repressed during the infection when they are produced inside recombinant mycobacteria. Step i) of the method may comprise a step for sequencing the inserts selected.

[0082] Preferably, in the method according to the invention, the vector used is chosen from the plasmids pJVEDa (CNCM, No. I-1797), pJVEDb (CNCM, No. I-1906), pJVEDc (CNCM, No. I-1799) or pJVED/M. tuberculosis (CNCM, No. I-1907), and the digestion of the mycobacterial DNA sequences is carried out by means of the enzyme Sau3A.

[0083] According to a preferred embodiment of the invention, the method of screening is characterized in that the mycobacterial sequences are derived from a pathogenic mycobacterium, for example from M. tuberculosis, M. bovis, M. avium, M. africanum or M. leprae.

[0084] The invention also comprises a library of genomic DNA or of cDNA which is complementary to mycobacterial mRNA, characterized in that it is obtained by a method comprising steps a) and b) or a), b) and c) of the preceding method according to the invention, preferably a library of genomic DNA or of cDNA which is complementary to mRNA of pathogenic mycobacteria, preferably of mycobacteria belonging to the Mycobacterium tuberculosis complex group, preferably of Mycobacterium tuberculosis.

[0085] In the present invention, “nucleic sequences” or “amino acid sequences” are understood to designate SEQ ID No. X to SEQ ID No. Y, where X and Y may independently represent a number or an alphanumeric character, respectively the set of nucleic sequences or the set of amino acid sequences represented by figures X to Y, ends included.

[0086] For example, the nucleic sequences or the amino acid sequences SEQ ID NOS: 1-87 are respectively the nucleic sequences or the amino acid sequences represented by FIGS. 1 to 4N.

[0087] The subject of the invention is also the nucleotide sequences of mycobacteria or comprising nucleotide sequences of mycobacteria selected after carrying out the method according to the invention which is described above.

[0088] Preferably, said mycobacterium is chosen from M. tuberculosis, M. bovis, M. africanum, M. avium, M. leprae, M. paratuberculosis, M. kansassi or M. xenopi.

[0089] The nucleotide sequences of mycobacteria or comprising a mycobacterial nucleotide sequence are preferred, said mycobacterial nucleotide sequence being chosen from the sequences of mycobacterial DNA fragments having the nucleic sequences SEQ ID NOS: 1, 8, 14, 25, 31, 33, 35, 41, 46, 52, 56, 62, 64, 67, 69, 72, 74, 76, 78, 81, 84, 86, 88, 90, 92, 96, 98, 100, 104, 106, 108, 110, 113, 119, 122, 128, 133, 137, 139, 141, 143, 145, 148, 150, 152, 154, 156, 158, 160, 162, 165, 169, 177, 184, 189, 195, 200, 202, 206, 209, 211, 213, 217, 220, 225, 228, 238, 246, 250, 255, 258, 260, 262, 268, 274, 278, 280, 282, 284, 286, 288, 290, 297, 310, 317, 321, 323, 325, 327, 331, 333, 335, 337, 339, 346, 347, 353, 357, 359, 361, 364, 368, 371, 374, 380, 383, 385, 387, 389, 393, 395, 397, 399, 403, 405, 407, 410, 412, 419, 421, 426, 429, 431, 433, 437, 441, 447, 452, 456, 459, 461, 463, 469, 472, 474, 476, 482, 485, 487, 489, 495, 497, 501, 505, 510, 516, 519, 522, 530, 534, 537, 544, 546, 550, 552, 554, 556, 558, 564, 569, 571, 573, 576, 580, 584, 586, 588, 590, 594, 596, 598, 600, 604, 608, 610, 612, 614, 616, 618, 620, 622, 624, 626, 629, 631, 633, 635, 640, 647, 649, 651, 653, 657, 660, 662, 664, 666, 669, 674, 676, 678, 683, 686, 691, 693, 695, 697, 702, 717, 728, 733, 736, 739, 741, 743, 746, 752, 755, 757, 759, 761, 764, 767, 769, 771, 784, 794, 805, 807, 809, 811, 813, 817, 821, 823, 825, 827, 831, 833, 835, 837, 839, 842, 844, 846, 848, 864, 878, 883, 885, 887, 895, 901, 907, and 909, which are represented respectively by FIGS. 1 to 24C (plates 1 to 150), by FIGS. 27A to 27C (plates 152 to 154), by FIG. 29 (plate 156) and by FIGS. 31A to 50F (plates 158 to 275).

[0090] According to a specific embodiment of the invention, preferred sequences are, for example, the mycobacterial DNA fragments having the sequence SEQ ID NO: 1, which is contained in the vector pDP428 (CNCM, No. I-1818), SEQ ID NO: 41, which is contained in the vector p6D7 (CNCM, No. I-1814), SEQ ID NOS: 88 and 96, which are contained in the vector p5F6 (CNCM, No. I-1816), SEQ ID NO: 110, which is contained in the vector p2A29 (CNCM, No. I-1817), SEQ ID NO: 122, which is contained in the vector p5B5 (CNCM, No. I-1819), SEQ ID NOS: 137 and 143, which are contained in the vector p1C7 (CNCM, No. I-1820), SEQ ID NO: 158, which is contained in the vector p2D7 (CNCM, No. I-1821), SEQ ID NO: 165, which is contained in the vector p1B7 (CNCM, No. I-1843), SEQ ID NO: 530, which is contained in the vector p5A3 (CNCM, No. I-1815), or SEQ ID NO: 544, which is contained in the vector pM1C25 (CNCM, No. I-2062.

[0091] The invention also relates to a nucleic acid comprising the entire open reading frame of one of the nucleotide sequences according to the invention, in particular one of the sequences SEQ ID NOS: 1, 8, 14, 25, 31, 33, 35, 41, 46, 52, 56, 62, 64, 67, 69, 72, 74, 76, 78, 81, 84, 86, 88, 90, 92, 96, 98, 100, 104, 106, 108, 110, 113, 119, 122, 128, 133, 137, 139, 141, 143, 145, 148, 150, 152, 154, 156, 158, 160, 162, 165, 169, 177, 184, 189, 195, 200, 202, 206, 209, 211, 213, 217, 220, 225, 228, 238, 246, 250, 255, 258, 260, 262, 268, 274, 278, 280, 282, 284, 286, 288, 290, 297, 310, 317, 321, 323, 325, 327, 331, 333, 335, 337, 339, 346, 347, 353, 357, 359, 361, 364, 368, 371, 374, 380, 383, 385, 387, 389, 393, 395, 397, 399, 403, 405, 407, 410, 412, 419, 421, 426, 429, 431, 433, 437, 441, 447, 452, 456, 459, 461, 463, 469, 472, 474, 476, 482, 485, 487, 489, 495, 497, 501, 505, 510, 516, 519, 522, 530, 534, 537, 544, 546, 550, 552, 554, 556, 558, 564, 569, 571, 573, 576, 580, 584, 586, 588, 590, 594, 596, 598, 600, 604, 608, 610, 612, 614, 616, 618, 620, 622, 624, 626, 629, 631, 633, 635, 640, 647, 649, 651, 653, 657, 660, 662, 664, 666, 669, 674, 676, 678, 683, 686, 691, 693, 695, 697, 702, 717, 728, 733, 736, 739, 741, 743, 746, 752, 755, 757, 759, 761, 764, 767, 769, 771, 784, 794, 805, 807, 809, 811, 813, 817, 821, 823, 825, 827, 831, 833, 835, 837, 839, 842, 844, 846, 848, 864, 878, 883, 885, 887, 895, 901, 907, and 909 according to the invention.

[0092] Said nucleic acid may be isolated, for example, in the following manner:

[0093] a) preparation of a cosmid library from the M. tuberculosis DNA, for example according to the technique described by Jacobs et al., 1991;

[0094] b) hybridization of all or part of a probe nucleic acid having the sequences chosen, for example, from SEQ ID NOS: 1, 8, 14, 25, 31, 33, 35, 41, 46, 52, 56, 62, 64, 67, 69, 72, 74, 76, 78, 81, 84, 86, 88, 90, 92, 96, 98, 100, 104, 106, 108, 110, 113, 119, 122, 128, 133, 137, 139, 141, 143, 145, 148, 150, 152, 154, 156, 158, 160, 162, 165, 169, 177, 184, 189, 195, 200, 202, 206, 209, 211, 213, 217, 220, 225, 228, 238, 246, 250, 255, 258, 260, 262, 268, 274, 278, 280, 282, 284, 286, 288, 290, 297, 310, 317, 321, 323, 325, 327, 331, 333, 335, 337, 339, 346, 347, 353, 357, 359, 361, 364, 368, 371, 374, 380, 383, 385, 387, 389, 393, 395, 397, 399, 403, 405, 407, 410, 412, 419, 421, 426, 429, 431, 433, 437, 441, 447, 452, 456, 459, 461, 463, 469, 472, 474, 476, 482, 485, 487, 489, 495, 497, 501, 505, 510, 516, 519, 522, 530, 534, 537, 544, 546, 550, 552, 554, 556, 558, 564, 569, 571, 573, 576, 580, 584, 586, 588, 590, 594, 596, 598, 600, 604, 608, 610, 612, 614, 616, 618, 620, 622, 624, 626, 629, 631, 633, 635, 640, 647, 649, 651, 653, 657, 660, 662, 664, 666, 669, 674, 676, 678, 683, 686, 691, 693, 695, 697, 702, 717, 728, 733, 736, 739, 741, 743, 746, 752, 755, 757, 759, 761, 764, 767, 769, 771, 784, 794, 805, 807, 809, 811, 813, 817, 821, 823, 825, 827, 831, 833, 835, 837, 839, 842, 844, 846, 848, 864, 878, 883, 885, 887, 895, 901, 907, 909, with the cosmids of the library previously prepared in step a);

[0095] c) selection of the cosmids hybridizing with the probe nucleic acid of step b);

[0096] d) sequencing of the DNA inserts of the clones selected in step c) and identification of the complete open reading frame;

[0097] e) where appropriate, cloning of the inserts sequenced in step d) into an appropriate expression and/or cloning vector.

[0098] The nucleic acids comprising the entire open reading frame of the sequences SEQ ID NOS: 1, 8, 14, 25, 31, 33, 35, 41, 46, 52, 56, 62, 64, 67, 69, 72, 74, 76, 78, 81, 84, 86, 88, 90, 92, 96, 98, 100, 104, 106, 108, 110, 113, 119, 122, 128, 133, 137, 139, 141, 143, 145, 148, 150, 152, 154, 156, 158, 160, 162, 165, 169, 177, 184, 189, 195, 200, 202, 206, 209, 211, 213, 217, 220, 225, 228, 238, 246, 250, 255, 258, 260, 262, 268, 274, 278, 280, 282, 284, 286, 288, 290, 297, 310, 317, 321, 323, 325, 327, 331, 333, 335, 337, 339, 346, 347, 353, 357, 359, 361, 364, 368, 371, 374, 380, 383, 385, 387, 389, 393, 395, 397, 399, 403, 405, 407, 410, 412, 419, 421, 426, 429, 431, 433, 437, 441, 447, 452, 456, 459, 461, 463, 469, 472, 474, 476, 482, 485, 487, 489, 495, 497, 501, 505, 510, 516, 519, 522, 530, 534, 537, 544, 546, 550, 552, 554, 556, 558, 564, 569, 571, 573, 576, 580, 584, 586, 588, 590, 594, 596, 598, 600, 604, 608, 610, 612, 614, 616, 618, 620, 622, 624, 626, 629, 631, 633, 635, 640, 647, 649, 651, 653, 657, 660, 662, 664, 666, 669, 674, 676, 678, 683, 686, 691, 693, 695, 697, 702, 717, 728, 733, 736, 739, 741, 743, 746, 752, 755, 757, 759, 761, 764, 767, 769, 771, 784, 794, 805, 807, 809, 811, 813, 817, 821, 823, 825, 827, 831, 833, 835, 837, 839, 842, 844, 846, 848, 864, 878, 883, 885, 887, 895, 901, 907, 909, are among the preferred nucleic acids.

[0099] The present invention makes it possible to determine a gene fragment encoding an exported polypeptide. Comparison with the genome sequence published by Cole et al. (Cole et al., 1998, Nature, 393, 537-544) makes it possible to determine the whole gene carrying the identified sequence according to the present invention.

[0100] Nucleotide sequence comprising the entire open reading frame of a sequence according to the invention is understood to mean the nucleotide sequence (genomic, cDNA, semisynthetic or synthetic) comprising one of the sequences according to the invention and extending, on the one hand, in 5′ of these sequences up to the first codon for initiation of translation (ATG or GTG) or even up to the first stop codon, and, on the other hand, in 3′ of these sequences up to the next stop codon, this being in any one of the three possible reading frames.

[0101] The nucleotide sequences which are complementary to the above sequences according to the invention also form part of the invention.

[0102] Polynucleotide having a sequence which is complementary to a nucleotide sequence according to the invention is understood to mean any DNA or RNA sequence whose nucleotides are complementary to those of said sequence according to the invention and whose orientation is reversed.

[0103] The nucleotide fragments of the above sequences according to the invention, which are in particular useful as probes or primers, also form part of the invention.

[0104] The invention also relates to the polynucleotides, characterized in that they comprise a polynucleotide chosen from:

[0105] a) a polynucleotide whose sequence is complementary to the sequence of a polynucleotide according to the invention,

[0106] b) a polynucleotide whose sequence comprises at least 50% identity with a polynucleotide according to the invention,

[0107] c) a polynucleotide which hybridizes, under high stringency conditions, with a polynucleotide sequence according to the invention,

[0108] d) a fragment of at least 8 consecutive nucleotides of a polynucleotide defined according to the invention.

[0109] The high stringency conditions as well as the percentage identity will be defined below in the present description.

[0110] When the coding sequence derived from the export and/or secretion marker gene is a sequence derived from the phoA gene, the export and/or secretion of the product of the phoA gene, truncated where appropriate, is obtained only when this sequence is inserted in phase with the sequence or element for regulating the expression of the production of polynucleotides and its location placed upstream, which contains the elements controlling the expression, export and/or secretion which are derived from a mycobacterial sequence.

[0111] The recombinant vectors of the invention may of course comprise multiple cloning sites which are shifted by one or two nucleotides relative to a vector according to the invention, thus making it possible to express the polypeptide corresponding to the mycobacterial DNA fragment which is inserted and which is capable of being translated according to one of the three possible reading frames.

[0112] For example, the preferred vectors pJVEDb and pJVEDc of the invention are distinguishable from the preferred vector pJVEDa by a respective shift of one and two nucleotides at the level of the multiple cloning site.

[0113] Thus, the vectors of the invention are capable of expressing each of the polypeptides which are capable of being encoded by an inserted mycobacterial DNA fragment. Said polypeptides, characterized in that they are therefore capable of being exported and/or secreted, and/or induced or repressed, or expressed constitutively during the infection, form part of the invention.

[0114] The polypeptides of the invention whose amino acid sequences are chosen from the amino acid sequences SEQ ID NOS 2-7, 9-13, 15-24, 26-30, 32, 34, 36-40, 42-45, 47-51, 53-55, 57-61, 63, 65-66, 68, 70-71, 73, 75, 77, 79-80, 82-83, 85, 87, 89, 91, 93-95, 97, 99, 101-103, 105, 107, 109, 111-112, 114-118, 123-127, 129-132, 134-136, 138, 272-273, 140, 142, 144, 146-147, 149, 151, 153, 155, 157, 159, 161, 163-164, 166-168, 170-176, 178-183, 185-188, 190-194, 196-199, 201, 203-205, 207-208, 210, 212, 214-216, 218-219, 221-224, 226-227, 923-925, 229-237, 239-245, 247-249, 251-254, 256 257, 259, 261, 263-267, 269-271, 275-277, 279, 281, 283, 285, 287, 289, 291-296, 298-309, 311-316, 318-320, 322, 324, 326, 328-330, 332, 334, 336, 338, 340-345, 348-352, 354-356, 358, 360, 926-930, 362-363, 365-367, 369-370, 372-373, 375-379, 381-382, 384, 386, 388, 390-392, 394, 396, 398, 400-402, 404, 406, 408-409, 411, 413-418, 420, 422-425, 427-428, 430, 432, 434-436, 438-440, 442-446, 448-451, 453-455, 457-458, 460, 462, 464-468, 470-471, 473, 475, 477-481, 483-484, 486, 488, 490-494, 496, 498-500, 502-504, 506-509, 511-515, 517-518, 520-521, 523-527, 531-533, 535-536, 538-542, 543, 545, 547-549, 551, 553, 555, 557, 559-563, 565-568, 570, 572, 574-575, 577-579, 581-583, 585, 587, 589, 591-593, 595, 597, 599, 601-603, 605-607, 609, 611, 613, 615, 617, 619, 621, 623, 625, 627-628, 630, 632, 634, 636-639, 641-646, 648, 650, 652, 654-656, 658-659, 661, 663, 665, 931-933, 667-668, 670-673, 675, 677, 679-682, 684-685, 687-690, 692, 694, 696, 698-701, 703-716, 718-727, 729-732, 734-735, 737-738, 740, 742, 744-745, 747-751, 753-754, 756, 758, 760, 762-763, 765-766, 768, 770, 772-783, 785-793, 795-804, 806, 808, 810, 812, 814-816, 818-820, 822, 824, 826, 828-830, 832, 834, 836, 838, 840-841, 843, 845, 847, 849-863, 865-877, 879-882, 884, 886, 888-894, 896-900, 902-906, 908, 910, and represented respectively by FIGS. 1 to 24C (plates 1 to 150), FIGS. 27A to 28 (plates 152 to 155) and FIGS. 30 to 50F (plates 157 to 275) are in particular preferred.

[0115] Also forming part of the invention are the fragments or biologically active fragments as well as the polypeptides which are homologous to said polypeptides; fragment, biologically active fragment and polypeptides which are homologous to a polypeptide being as defined below in the description.

[0116] The invention also relates to the polypeptides comprising a polypeptide or one of their fragments according to the invention.

[0117] The subject of the invention is also recombinant mycobacteria containing a recombinant vector according to the invention which is described above. A preferred mycobacterium is a mycobacterium of the M. smegmatis type.

[0118] M. smegmatis advantageously makes it possible to test the efficiency of mycobacterial sequences for controlling the expression, export and/or secretion, and/or promoter activity of a given sequence, for example of a sequence encoding a marker such as alkaline phosphatase and/or luciferase.

[0119] Another preferred mycobacterium is a mycobacterium of the M. bovis type, for example the BCG strain which is currently used for vaccination against tuberculosis.

[0120] Another preferred mycobacterium is a strain of M. tuberculosis, M. bovis or M. africanum potentially possessing all the appropriate regulatory systems.

[0121] The inventors have thus characterized, in particular, a polynucleotide consisting of a nucleotide sequence which is present in all the tested strains of mycobacteria belonging to the Mycobacterium tuberculosis complex. This polynucleotide, called DP428, contains an open reading frame (ORF) encoding a polypeptide of about 12 kD. The open reading frame (ORF) encoding the polypeptide DP428 extends from the nucleotide at position nt 451 to the nucleotide at position nt 861 of the sequence SEQ ID NO: 35, the polypeptide DP428 having the following amino acid sequences SEQ ID NOS: 39 & 543:

MKTGTATTRRRLLAVLIALALPGAAVALLAEPSATGASDPCAASEVARTV
GSVAKSMGDYLDSHPETNQVMTAVLQQQVGPGSVASLKAHFEANPKVASD
LHALSQPLTDLSTRCSLPISGLQAIGLMQAVQGARR.

[0122] This molecular weight (MW) corresponds to the theoretical MW of the mature protein obtained after cleavage of the signal sequence, the MW of the protein or polypeptide DP428 being about 10 kD after potential anchorage to peptidoglycan and potential cleavage between S and G of the LPISG motif.

[0123] This polynucleotide includes, on the one hand, an open reading frame corresponding to a structural gene and, on the other hand, the signals for regulating the expression of the coding sequence upstream and downstream of the latter. The polypeptide DP428 is composed of a signal peptide, a hydrophilic central region and a hydrophobic C-terminal region. The latter ends with two arginine residues (R), a retention signal, and is preceded by an LPISG motif which resembles the LPXTG motif for anchorage to peptidoglycan (Schneewind et al., 1995).

[0124] Structural gene for the purposes of the present invention is understood to mean a polynucleotide encoding a protein, a polypeptide or alternatively a fragment of the latter, said polynucleotide comprising only the sequence corresponding to the open reading frame (ORF), which excludes the sequences on the 5′ side of the open reading frame (ORF) which direct the initiation of transcription.

[0125] Thus, the invention relates in particular to a polynucleotide whose sequence is chosen from the nucleotide sequences SEQ ID NOS: 1, 8, 14, 25, 31, 33, and 35.

[0126] More particularly, the invention relates to a polynucleotide, characterized in that it comprises a polynucleotide chosen from:

[0127] a) a polynucleotide whose sequence is chosen from the nucleotide sequences SEQ ID NOS: 1, 8, 14, 25, 31, 33, and 35, b) a polynucleotide whose nucleic sequence is the sequence between the nucleotide at position nt 964 and the nucleotide at position nt 1234, ends included, of the sequence SEQ ID NOS: 1, 8, 14, 25, 31, and 33,

[0128] c) a polynucleotide whose sequence is complementary to the sequence of a polynucleotide defined in a) or b), d) a polynucleotide whose sequence exhibits at least 50% identity with a polynucleotide defined in a), b) or c), e) a polynucleotide which hybridizes, under high stringency conditions, with a sequence of a polynucleotide defined in a), b), c) or d), f) a fragment of at least 8 consecutive nucleotides of a polynucleotide defined in a), b), c), d) or e).

[0129] Nucleotide sequence, polynucleotide or nucleic acid is understood to mean, according to the present invention, a double-stranded DNA, a single-stranded DNA and products of transcription of said DNAs.

[0130] Percentage identity for the purpose of the present invention is understood to mean a percentage identity between the bases of two polynucleotides, this percentage being purely statistical and the differences between the two polynucleotides being distributed randomly and over their entire length.

[0131] Hybridization under high stringency conditions means that the temperature and ionic strength conditions are chosen such that they allow the hybridization between two complementary DNA fragments to be maintained.

[0132] By way of illustration, high stringency conditions of the hybridization step for the purposes of defining the polynucleotide fragments described above are advantageously the following:

[0133] the hybridization is carried out at a temperature which is preferably 65° C., in the presence of buffer marketed under the name rapid-hyb buffer by Amersham (RPN 1636) and 100 μg/ml of E. coli DNA.

[0134] The washing steps may, for example, be the following:

[0135] two washes of 10 min, preferably at 65° C., in a 2×SSC buffer and 0.1% SDS;

[0136] two washes of 10 min, preferably at 65° C., in a 1×SSC buffer and 0.1% SDS;

[0137] one wash of 10 min, preferably at 65° C., in a 0.1×SSC buffer and 0.1% SDS.

[0138] 1×SSC corresponds to 0.15 M NaCl and 0.05 M Na citrate and a 1× Denhardt solution corresponds to 0.02% Ficoll, 0.02% of polyvinylpyrrolidone and 0.02% of bovine serum albumin.

[0139] Advantageously, a nucleotide fragment corresponding to the preceding definition will have at least 8 nucleotides, preferably at least 12 nucleotides, and still more preferably at least 20 consecutive nucleotides of the sequence from which it is derived. The high stringency hybridization conditions described above for a polynucleotide having a size of about 200 bases will be adjusted by persons skilled in the art for oligonucleotides with a larger or a smaller size, according to the teaching of Sambrook et al., 1989.

[0140] For the conditions for using the restriction enzymes with the aim of obtaining nucleotide fragments of the polynucleotides according to the invention, reference will be advantageously made to the manual by Sambrook et al., 1989.

[0141] Advantageously, a polynucleotide of the invention will contain at least one sequence comprising the stretch of nucleotides going from the nucleotide at position nt 964 to the nucleotide nt 1234 of the polynucleotide having the sequence SEQ ID NOS 1, 8, 14, 25, 31, and 33.

[0142] The subject of the present invention is a polynucleotide according to the invention, characterized in that its nucleic sequence hybridizes with the DNA of a sequence of mycobacteria and preferably with the DNA of a sequence of mycobacteria belonging to the Mycobacterium tuberculosis complex.

[0143] The polynucleotide is encoded by a polynucleotide sequence as described supra.

[0144] The subject of the present invention is also a polypeptide derived from a mycobacterium, characterized in that it is present only in the mycobacteria belonging to the Mycobacterium tuberculosis complex.

[0145] The invention also relates to a polypeptide characterized in that it comprises a polypeptide chosen from:

[0146] a) a polypeptide whose amino acid sequence is included in an amino acid sequence chosen from the amino acid sequences SEQ ID NOS 2-7, 9-13, 15-24, 26-30, 32, 34, 36-40, 42-45, 47-51, 53-55, 57-61, 63, 65-66, 68, 70-71, 73, 75, 77, 79-80, 82-83, 85, 87, 89, 91, 93-95, 97, 99, 101-103, 105, 107, 109, 111-112, 120-121, 123-127, 129-132, 134-136, 138, 272-273, 140, 142, 144, 146-147, 149, 151, 153, 155, 157, 159, 161, 163-164, 166-168, 170-176, 185-188, 190-194, 196-199, 201, 203-205, 207-208, 210, 212, 214-216, 218-219, 221-224, 226-227, 923-925, 229-237, 239-245, 247-249, 251-254, 256-257, 259, 261, 263-267, 269-271, 275-277, 279, 281, 283, 285, 287, 289, 291-296, 298-309, 311-316, 318-320, 322, 324, 326, 328-330, 332, 334, 336, 338, 340-345, 348-352, 354-356, 358, 360, 926-930, 362-363, 365-367, 369-370, 372-373, 375-379, 381-382, 384, 386, 388, 390-392, 394, 396, 398, 400-402, 404, 406, 408-409, 411, 413-418, 420, 422-425, 427-428, 430, 432, 434-436, 438-440, 442-446, 448-451, 453-455, 457-458, 460, 462, 464-468, 470-471, 473, 475, 477-481, 483-484, 486, 488, 490-494, 496, 498-500, 502-504, 506-509, 511-515, 517-518, 520-521, 523-527, 531-533, 535-536, 538-542, 543, 545, 547-549, 551, 553, 555, 557, 559-563, 565-568, 570, 572, 574-575, 577-579, 581-583, 585, 587, 589, 591-593, 595, 597, 599, 601-603, 605-607, 609, 611, 613, 615, 617, 619, 621, 623, 625, 627-628, 630, 632, 634, 636-639, 641-646, 648, 650, 652, 654-656, 658-659, 661, 663, 665, 931-933, 667-668, 670-673, 675, 677, 679-682, 684-685, 687-690, 692, 694, 696, 698-701, 703-716, 718-727, 729-732, 734-735, 737-738, 740, 742, 744-745, 747-751, 753-754, 756, 758, 760, 762-763, 765-766, 768, 770, 772-783, 785-793, 795-804, 806, 808, 810, 812, 814-816, 818-820, 822, 824, 826, 828-830, 832, 834, 836, 838, 840-841, 843, 845, 847, 849-863, 865-877, 879-882, 884, 886, 888-894, 896-900, 902-906, 908, and 910,

[0147] b) a polypeptide which is homologous to the polypeptide defined in a),

[0148] c) a fragment of at least 5 amino acids of a polypeptide defined in a) or b),

[0149] d) a biologically active fragment of a polypeptide defined in a), b) or c).

[0150] The subject of the present invention is also a polypeptide whose amino acid sequence is included in the amino acid sequences SEQ ID NOS: SEQ ID NOS: 2-7, 9-13, 15-24, 26-30, 32, 34, 36-40, or a polypeptide having the amino acid sequence SEQ ID NO: 543.

[0151] Homologous polypeptide will be understood to designate the polypeptides exhibiting, relative to the natural polypeptide according to the invention such as the polypeptide DP428, certain modifications such as in particular a deletion, addition or substitution of at least one amino acid, a truncation, an extension, a chimeric fusion, and/or a mutation. Among the homologous polypeptides, those whose amino acid sequence exhibits at least 30%, preferably 50%, homology with the amino acid sequences of the polypeptides according to the invention are preferred. In the case of a substitution, one or more consecutive or nonconsecutive amino acids are replaced with “equivalent” amino acids. The expression “equivalent” amino acid is intended here to designate any amino acid capable of being substituted for one of the amino acids of the parent structure without, however, essentially modifying the immunogenic properties of the corresponding peptides. In other words, the equivalent amino acids will be those which allow the production of a polypeptide having a modified sequence which allows the induction in vivo of antibodies or of cells capable of recognizing the polypeptide whose amino acid sequence is included in the amino acid sequence of the polypeptide according to the invention, such as the amino acid sequences SEQ ID NOS: 2-7, 9-13, 15-24, 26-30, 32, 34, 36-40, or a polypeptide having the amino acid sequence SEQ ID NO: 543 (polypeptide DP428) or one of its above-defined fragments.

[0152] These equivalent aminoacyls may be determined either based on their structural homology with the aminoacyls for which they are substituted, or on the results of cross-immunogenicity assays to which the different peptides are capable of giving rise.

[0153] By way of example, there may be mentioned the possibilities of substitutions which are capable of being made without resulting in a profound modification of the immunogenicity of the corresponding modified peptides, the replacements, for example, of leucine with valine or isoleucine, of aspartic acid with glutamic acid, of glutamine with asparagine and of arginine with lysine, and the like, it being possible to naturally envisage the reverse substitutions under the same conditions.

[0154] Biologically active fragment will be understood to designate in particular a fragment of an amino acid sequence of a polypeptide having at least one of the characteristics of the polypeptides according to the invention, in particular in that it is:

[0155] capable of being exported and/or secreted by a mycobacterium, and/or of being induced or repressed during infection with the mycobacterium; and/or

[0156] capable of inducing, repressing or modulating, directly or indirectly, a mycobacterium virulence factor; and/or

[0157] capable of inducing an immunogenicity reaction directed against mycobacteria; and/or

[0158] capable of being recognized by an antibody which is specific for mycobacterium.

[0159] Polypeptide fragment is understood to designate a polypeptide comprising a minimum of 5 amino acids, preferably 10 amino acids and 15 amino acids.

[0160] A polypeptide of the invention, or one of its fragments, as defined above, is capable of being specifically recognized by the antibodies present in the serum of patients infected by mycobacteria and preferably bacteria belonging to the Mycobacterium tuberculosis complex or by cells of the infected host.

[0161] Thus, forming part of the invention are the fragments of the polypeptide whose amino acid sequence is included in the amino acid sequence of a polypeptide according to the invention, such as the amino acid sequences SEQ ID NOS: 2-7, 9-13, 15-24, 26-30, 32, 34, 3640, or a polypeptide having an amino acid sequence SEQ ID NO: 543, which may be obtained by cleavage of said polypeptide with a proteolytic enzyme, such as trypsin or chymotrypsin or collagenase, or with a chemical reagent, such as cyanogen bromide (CNBr) or alternatively by placing a polypeptide according to the invention such as the polypeptide DP428 in a very acidic environment, for example at pH 2.5. Preferred peptide fragments according to the invention, for use in diagnosis or in vaccination, are the fragments contained in regions of a polypeptide according to the invention such as the polypeptide DP428 which are capable of being naturally exposed to the solvent and to thus exhibit substantial immunogenicity properties. Such peptide fragments may be prepared either by chemical synthesis, from hosts transformed with an expression vector according to the invention containing a nucleic acid allowing the expression of said fragments, placed under the control of appropriate regulatory and/or expression elements or alternatively by chemical or enzymatic cleavage.

[0162] Analysis of the hydrophilicity of the polypeptide DP428 was carried out with the aid of the DNA Strider™ software (marketed by CEA Saclay) on the basis of a calculation of the hydrophilic character of the region encoding DP428 of SEQ ID NO: 543. The results of this analysis are presented in FIG. 54 where the hydrophilicity index is detailed, for each of the amino acids (AA) having a defined position in SEQ ID NO: 543. The higher the hydrophilicity index, the more the amino acid considered is likely to be exposed to the solvent in the native molecule, and is subsequently likely to exhibit a high degree of antigenicity. Thus, a stretch of at least seven amino acids possessing a high hydrophilicity index (>0.3) can constitute the basis of the structure of an immunogenic candidate peptide according to the present invention.

[0163] The cellular immune responses of the host to a polypeptide according to the invention can be demonstrated according to the techniques described by Colignon et al., 1996.

[0164] From the data of the hydrophilicity map presented in FIG. 54, the inventors were able to define regions of the polypeptide DP428 which are preferably exposed to the solvent, more particularly the region located between amino acids 55 and 72 of the sequence SEQ ID NO: 543 and the region located between amino acids 99 and 107 of SEQ ID NO: 543.

[0165] The peptide regions of the polypeptide DP428 which are defined above may be advantageously used for the production of immunogenic compositions or of vaccine compositions according to the invention.

[0166] The polynucleotides characterized in that they encode a polypeptide according to the invention also form part of the invention.

[0167] The invention also relates to the nucleic acid sequences which can be used as probes or primers, characterized in that said sequences are chosen from the nucleic acid sequences of polynucleotides according to the invention.

[0168] The invention relates, in addition, to the use of a nucleic acid sequence of polynucleotides according to the invention as a probe or a primer for the detection and/or amplification of a nucleic acid sequence. Among these nucleic acid sequences according to the invention which can be used as probes or primers there are preferred the nucleic acid sequences of the invention, characterized in that said sequences are sequences, or their complementary sequence, between the nucleotide at position nt 964 and the nucleotide at position nt 1234, ends included, of the sequence SEQ ID NOS: 1, 8, 14, 25, 31, and 33.

[0169] Among the polynucleotides according to the invention which can be used as nucleotide primers, the polynucleotides having the sequences SEQ ID NO: 528 and SEQ ID NO: 529 are particularly preferred.

[0170] The polynucleotides according to the invention may thus be used to select nucleotide primers, in particular for the PCR technique (Erlich, 1989; Innis et al., 1990, and, Rolfs et al., 1991).

[0171] This technique requires the choice of oligonucleotide pairs flanking the fragment which has to be amplified. Reference may be made, for example, to the technique described in American patent U.S. Pat. No. 4,683,202. These oligodeoxyribonucleotide or oligoribonucleotide primers advantageously have a length of at least 8 nucleotides, preferably of at least 12 nucleotides, and still more preferably of at least 20 nucleotides. Primers having a length of between 8 and 30 and preferably 12 and 22 nucleotides will be preferred in particular. One of the two primers is complementary to the (+) strand [forward primer] of the template and the other primer is complementary to the (−) strand [backward primer]. It is important that the primers do not possess a secondary structure or sequences which are complementary to each other. Moreover, the length and the sequence of each primer should be chosen so that the primers do not hybridize with other nucleic acids from prokaryotic or eukaryotic cells, in particular with the nucleic acids from other pathogenic mycobacteria, or with human DNA or RNA which may possibly contaminate the biological sample.

[0172] The results presented in FIG. 51 show that the sequence encoding the polypeptide DP428 (SEQ ID NO: 543) is not found in the DNAs of M. fortuitum, M. simiae, M. avium, M. chelonae, M. flavescens, M. gordonae, M. marinum and M. kansasii.

[0173] The amplified fragments may be identified after agarose or polyacrylamide gel electrophoresis or after capillary electrophoresis, or alternatively after a chromatographic technique (gel filtration, hydrophobic chromatography or ion-exchange chromatography). The specificity of the amplification may be checked by molecular hybridization using, as probes, the nucleotide sequences of polynucleotides of the invention, plasmids containing these sequences or their amplification products.

[0174] The amplified nucleotide fragments may be used as reagents in hybridization reactions in order to detect the presence, in a biological sample, of a target nucleic acid having a sequence which is complementary to that of said amplified nucleotide fragments.

[0175] Among the polynucleotides according to the invention which can be used as nucleotide probes, the polynucleotide fragment comprising the sequence between the nucleotide at position nt 964 and the nucleotide at position nt 1234, ends included, of the sequence SEQ ID NO: 1 is most particularly preferred.

[0176] These probes and amplicons may be labeled or otherwise with radioactive elements or with nonradioactive molecules such as enzymes or fluorescent elements.

[0177] The invention also relates to the nucleotide fragments which are capable of being obtained by amplification with the aid of primers according to the invention.

[0178] Other techniques for the amplification of the target nucleic acid may be advantageously used as alternatives to PCR.

[0179] The SDA (Strand Displacement Amplification) technique (Walker et al., 1992) is an isothermic amplification technique whose principle is based on the capacity of a restriction enzyme to cut one of the two strands of its recognition site which is in the form of a hemiphosphorothioate and on the property of a DNA polymerase to initiate the synthesis of a new DNA strand from the 3′OH end created by the restriction enzyme and to displace the strand previously synthesized which is present downstream.

[0180] The polynucleotides of the invention, in particular the primers according to the invention, may also be used in other methods of amplifying a target nucleic acid, such as:

[0181] the TAS (Transcription-based Amplification System) technique described by Kwoh et al. in 1989;

[0182] the 3SR (Self-Sustained Sequence Replication) technique described by Guatelli et al. in 1990;

[0183] the NASBA (Nucleic Acid Sequence Based Amplification) technique described by Kievitis et al. in 1991;

[0184] the TMA (Transcription Mediated Amplification) technique.

[0185] The polynucleotides of the invention may also be used in techniques for the amplification or modification of the nucleic acid serving as probe, such as:

[0186] the LCR (Ligase Chain Reaction) technique described by Landegren et al. in 1988 and improved by Barany et al. in 1991, which uses a heat-stable ligase;

[0187] the RCR (Repair Chain Reaction) technique described by Segev in 1992;

[0188] the CPR (Cycling Probe Reaction) technique described by Duck et al. in 1990;

[0189] the Q-beta-replicase amplification technique described by Miele et al. in 1983 and improved in particular by Chu et al. in 1986, Lizardi et al. in 1988 and then by Burg et al. as well as Stone et al. in 1996.

[0190] In the case where the target polynucleotide to be detected is an RNA, for example an mRNA, a reverse transcriptase-type enzyme will be advantageously used, prior to using an amplification reaction using the primers according to the invention or to the use of a method of detection using the probes of the invention, in order to obtain a cDNA from the RNA contained in the biological sample. The cDNA obtained will then serve as target for the primers or probes used in the method of amplification or detection according to the invention.

[0191] The detection probe will be chosen so that it hybridizes with the amplicon generated. Such a detection probe will advantageously have a sequence of at least 12 nucleotides in particular of at least 15 nucleotides and preferably at least 200 nucleotides.

[0192] The nucleotide probes according to the invention are capable of detecting mycobacteria and preferably bacteria belonging to the Mycobacterium tuberculosis complex, more particularly because of the fact that these mycobacteria possess in their genome at least one copy of polynucleotides according to the invention. These probes according to the invention are capable, for example, of hybridizing with the nucleotide sequence of a polypeptide according to the invention, more particularly any oligonucleotide hybridizing with the sequences SEQ ID NOS 1, 8, 14, 25, 31, and 33 encoding the M. tuberculosis polypeptide DP428 and not exhibiting a cross-hybridization reaction or an amplification reaction (PCR) with, for example, sequences present in mycobacteria not belonging to the Mycobacterium tuberculosis complex. The nucleotide probes according to the invention hybridize specifically with a DNA or RNA molecule of a polynucleotide according to the invention, under high stringency hybridization conditions as given in the form of an example above.

[0193] The nonlabeled sequences may be used directly as probes. However, the sequences are generally labeled with a radioactive element (³²P, ³⁵S, ³H, ¹²⁵I) or with a nonradioactive molecule (biotin, acetylaminofluorene, digoxigenin, 5-bromodeoxyuridine, fluorescein) in order to obtain probes which can be used for many applications.

[0194] Examples of nonradioactive labelings of probes are described, for example, in French patent No. 78,10975 or by Urdea et al. or by Sanchez-Pescador et al. in 1988.

[0195] In the latter case, it will also be possible to use one of the labeling methods described in patents FR 2,422,956 and FR 2,518,755. The hybridization technique may be carried out in various ways (Matthews et al., 1988). The most common method consists in immobilizing the nucleic acid extracted from mycobacterial cells onto a support (such as nitrocellulose, nylon, polystyrene) and in incubating, under well-defined conditions, the immobilized target nucleic acid with the probe. After hybridization, the excess probe is removed and the hybrid molecules formed are detected by the appropriate method (measurement of the radioactivity, of the fluorescence or of the enzymatic activity linked to the probe).

[0196] Advantageously, the labeled nucleotide probes according to the invention may have a structure such that they make amplification of the radioactive or nonradioactive signal possible. An amplification system corresponding to the above definition will comprise detection probes in the form of a branched, ramified DNA such as those described by Urdea et al. in 1991. According to this technique, several types of probe, in particular a capture probe, to immobilize the target DNA or RNA to a support, and a detection probe will be advantageously used. The detection probe binds a “branched” DNA having a ramified structure. The branched DNA in turn is capable of binding oligonucleotide probes which are themselves coupled to alkaline phosphatase molecules. The activity of this enzyme is then detected using a chemiluminescent substrate, for example a derivative of dioxethane phosphate.

[0197] According to another advantageous embodiment of the nucleic probes according to the invention, they can be covalently or noncovalently immobilized on a support and used as capture probes. In this case, a probe termed “capture probe” is immobilized on a support and serves to capture, through specific hybridization, the target nucleic acid obtained from the biological sample to be tested. If necessary, the solid support is separated from the sample and the duplex formed between the capture probe and the target nucleic acid is then detected by means of a second probe termed “detection probe” which is labeled with an easily detectable element.

[0198] The oligonucleotide fragments may be obtained from the sequences according to the invention by cleavage with restriction enzymes or by chemical synthesis according to conventional methods, for example according to the method described in European patent No. EP-0,305,929 (Millipore Corporation) or by other methods.

[0199] An appropriate method of preparing the nucleic acids of the invention comprising a maximum of 200 nucleotides (or 200 bp in the case of double-stranded nucleic acids) comprises the following steps:

[0200] synthesis of DNA using the automated beta-cyanethylphosphoramidite method described in 1986,

[0201] cloning of the nucleic acids thus obtained into an appropriate vector and recovery of the nucleic acids by hybridization with an appropriate probe.

[0202] A method of preparation, by the chemical route, of nucleic acids according to the invention having a length greater than 200 nucleotides (or 200 bp in the case of double-stranded nucleic acids) comprises the following steps:

[0203] assembly of chemically synthesized oligonucleotides, provided at their end with different restriction sites, whose sequences are compatible with the stretch of amino acids of the natural polypeptide according to the principle described in 1983,

[0204] cloning of the nucleic acids thus obtained into an appropriate vector and recovery of the desired nucleic acids by hybridization with an appropriate probe.

[0205] The nucleotide probes used for recovering the desired nucleic acids in the abovementioned methods generally consist of 8 to 200 nucleotides of the polypeptide sequence according to the invention and are capable of hybridizing with the nucleic acid tested for under the hybridization conditions defined above. The synthesis of these probes may be carried out according to the automated beta-cyanethylphosphoramidite method described in 1986.

[0206] The oligonucleotide probes according to the invention may be used in a detection device comprising an oligonucleotide array library. An exemplary embodiment of such an array library may consist of an array of probe oligonucleotides which are attached to a support, the sequence of each probe of a given length being situated with a shift of one or more bases relative to the preceding probe, each of the probes of the array arrangement thus being complementary to a distinct sequence of the target DNA or RNA to be detected and each probe of known sequence being attached at a predetermined position of the support. The target sequence to be detected may be advantageously labeled radioactively or nonradioactively. When the labeled target sequence is brought into contact with the array device, it forms hybrids with the probes having complementary sequences. A nuclease treatment, followed by washing, makes it possible to remove the probe-target sequence hybrids which are not perfectly complementary. Because of the precise knowledge of the sequence of a probe at a given position of the array, it is then possible to deduce the nucleotide sequence of the target DNA or RNA sequence. This technique is particularly effective when matrices of oligonucleotide probes of a large size are used.

[0207] An alternative to the use of a labeled target sequence may consist of using a support allowing a “bioelectronic” detection of the hybridization of the target sequence with the probes of the array support, when said support consists of or comprises a material capable of acting, for example, as an electron donor at the positions of the array where a hybrid has been formed. Such an electron-donating material is for example gold. The detection of the nucleotide sequence of the target DNA or RNA is then determined by an electronic device.

[0208] An exemplary embodiment of a biosensor, as defined above, is described in European patent application No. EP-0,721,016 in the name of Affymax Technologies N.V. or in American patent No. U.S. Pat. No. 5,202,231 in the name of Drmanac.

[0209] The subject of the invention is also the hybrid polynucleotides resulting:

[0210] either from the formation of a hybrid molecule between an RNA or a DNA (genomic DNA or cDNA) obtained from a biological sample with a probe or a primer according to the invention,

[0211] or from the formation of a hybrid molecule between an RNA or a DNA (genomic DNA or cDNA) obtained from a biological sample with a nucleotide fragment amplified with the aid of a pair of primers according to the invention.

[0212] cDNA for the purposes of the invention is understood to mean a DNA molecule obtained by causing a reverse transcriptase type enzyme to act on an RNA molecule, in particular a messenger RNA (mRNA) molecule, according to the techniques described in Sambrook et al. in 1989.

[0213] The subject of the present invention is also a family of recombinant plasmids, characterized in that they contain at least one nucleotide sequence of a polynucleotide according to the invention. According to an advantageous embodiment of said plasmid it comprises the nucleotide sequences SEQ ID NOS: 1, 8, 14, 25, 31, and 33, or a fragment thereof.

[0214] Another subject of the present invention is a vector for the cloning, expression and/or insertion of a sequence, characterized in that it comprises a nucleotide sequence of a polynucleotide according to the invention at a site which is not essential for its replication, where appropriate under the control of regulatory elements capable of playing a role in the expression of the polypeptide DP428, in a given host.

[0215] Specific vectors are for example plasmids, phages, cosmids, phagemids and YACs.

[0216] These vectors are useful for transforming host cells so as to clone or express the nucleotide sequences of the invention.

[0217] The invention also comprises the host cells transformed with a vector according to the invention.

[0218] Preferably, the host cells are transformed under conditions allowing the expression of a recombinant polypeptide according to the invention.

[0219] A preferred host cells according to the invention is the E. coli strain transformed with the plasmid pDP428 deposited on 28 Jan. 1997 at the CNCM under the No. I-1818 or transformed with the plasmid pM1C25 which was deposited on 4 Aug. 1998 at the CNCM under the No. I-2062 or a mycobacterium belonging to a strain of M. tuberculosis, M. bovis or M. africanum potentially possessing all the appropriate regulatory systems.

[0220] It is now easy to produce proteins or polypeptides in a relatively large quantity by genetic engineering using, as expression vectors, plasmids, phages or phagemids. All or part of the DP428 gene, or any polynucleotide according to the invention, may be inserted into an appropriate expression vector in order to produce in vitro a polypeptide according to the invention, in particular the polypeptide DP428. Said polypeptide may be attached to a microplate in order to develop a serological test intended to search, for diagnostic purposes, for the specific antibodies in patients suffering tuberculosis.

[0221] Thus, the present invention relates to a method of preparing a polypeptide, characterized in that it uses a vector according to the invention. More particularly, the invention relates to a method of preparing a polypeptide of the invention comprising the following steps:

[0222] where appropriate, the prior amplification, according to the PCR technique, of the quantity of nucleotide sequences encoding said polypeptide with the aid of two DNA primers chosen so that one of these primers is identical to the first 10 to 25 nucleotides of the nucleotide sequence encoding said polypeptide, while the other primer is complementary to the last 10 to nucleotides (or hybridizes with these last 10 to 25 nucleotides) of said nucleotide sequence, or conversely so that one of these primers is identical to the last 10 to 25 nucleotides of said sequence, while the other primer is complementary to the first 10 to 25 nucleotides (or hybridizes with the first 10 to nucleotides) of said nucleotide sequence, followed by the introduction of said sequences thus amplified into an appropriate vector,

[0223] the culture, in an appropriate culture medium, of a cellular host which has been previously transformed with an appropriate vector containing a nucleic acid according to the invention comprising the nucleotide sequence encoding said polypeptide, and

[0224] the separation, from said culture medium, of said polypeptide produced by said transformed cellular host.

[0225] The subject of the invention is also a polypeptide which is capable of being obtained by a method of the invention as described above.

[0226] The peptides according to the invention may also be prepared by techniques which are conventionally used in the field of peptide synthesis. This synthesis may be carried out in homogeneous solution or in solid phase.

[0227] For example, the technique of synthesis in homogeneous solution described by Houbenweyl in 1974 will be used.

[0228] This method of synthesis consists in successively condensing in pairs the successive aminoacyls in the required order, or in condensing aminoacyls and fragments formed beforehand and already containing several aminoacyls in the appropriate order, or alternatively several fragments thus prepared beforehand, it being understood that care will be taken to protect beforehand all the reactive functions carried by these aminoacyls or fragments, with the exception of the amine functions of one and the carboxyl functions of the other or vice versa, which should normally be involved in the formation of the peptide bonds, in particular after activation of the carboxyl function, according to methods well known in peptide synthesis. As a variant, use may be made of coupling reactions using conventional coupling reagents, of the carbodiimide type, such as for example 1-ethyl-3-(3-dimethylaminopropyl)carbodiimide.

[0229] When the aminoacyl used possesses an additional acid function (in particular in the case of glutamic acid), these functions will be protected, for example with t-butyl ester groups.

[0230] In the case of gradual synthesis, amino acid by amino acid, the synthesis preferably starts with the condensation of the C-terminal amino acid with the amino acid which corresponds to the neighboring aminoacyl in the desired sequence, and so on, step by step, up to the N-terminal amino acid.

[0231] According to another preferred technique of the invention, the one described by Merrifield is used.

[0232] To manufacture a peptide chain according to the Merrifield method, use is made of a very porous polymer resin onto which the first C-terminal amino acid of the chain is attached. This amino acid is attached to the resin via its carboxyl group and its amine function is protected, for example with the t-butyloxycarbonyl group.

[0233] When the first C-terminal amino acid is thus attached to the resin, the group for protecting the amine function is removed by washing the resin with an acid.

[0234] In the case where the group for protecting the amine function is the t-butyloxycarbonyl group, it may be removed by treating the resin with trifluoroacetic acid.

[0235] The second amino acid which provides the second aminoacyl of the desired sequence, from the C-terminal aminoacyl residue, is then coupled with the deprotected amine function of the first C-terminal amino acid attached to the chain. Preferably, the carboxyl function of this second amino acid is activated, for example with dicyclohexylcarbodiimide, and the amine function is protected, for example with t-butyloxycarbonyl.

[0236] The first portion of the desired peptide chain is thus obtained which comprises two amino acids, and whose terminal amine function is protected. As before, the amine function is deprotected and it is then possible to proceed to the attachment of the third aminoacyl, under conditions similar to those for the addition of the second C-terminal amino acid.

[0237] The amino acids which will constitute the peptide chain will thus be attached, one after the other, to the amino group, each time deprotected beforehand, of the portion of the peptide chain which is already formed and which is attached to the resin.

[0238] When the entire desired peptide chain is formed, the groups for protecting the different amino acids constituting the peptide chain are removed and the peptide is detached from the resin, for example with the aid of hydrofluoric acid.

[0239] Preferably, said polypeptides which are capable of being obtained by a method of the invention as described above will comprise a region exposed to the solvent and will have a length of at least 20 amino acids.

[0240] According to another embodiment of the invention, said polypeptides are specific to mycobacteria of the Mycobacterium tuberculosis complex and are not therefore recognized by antibodies specific for other mycobacterial proteins.

[0241] The invention relates, in addition, to hybrid polypeptides having at least one polypeptide according to the invention and a sequence of a polypeptide capable of inducing an immune response in humans or animals.

[0242] Advantageously, the antigenic determinant is such that it is capable of inducing a humoral and/or cellular response.

[0243] Such a determinant may comprise a polypeptide according to the invention, in glycosylated form, which is used to obtain immunogenic compositions capable of inducing the synthesis of antibodies directed against multiple epitopes. Said glycosylated polypeptides also form part of the invention.

[0244] These hybrid molecules may consist in part of a polypeptide-carrying molecule according to the invention combined with a portion, in particular an epitope of the diphtheria toxin, the tetanus toxin, a hepatitis B virus surface antigen (patent FR 79 21811), the VP1 antigen of the poliomyelitis virus or any other viral or bacterial toxin or antigen.

[0245] Advantageously, said antigenic determinant corresponds to an antigenic determinant of immunogenic proteins of 45/47 kD of M. tuberculosis (international application PCT/FR 96/0166), or alternatively which are selected for example from ESAT6 (Harboe et al., 1996, Andersen et al., 1995, and Sorensen et al., 1995) and DES (PCT/FR 97/00923, Gicquel et al.).

[0246] A viral antigen, as defined above, will be preferably a hepatitis virus surface or envelope protein, for example the hepatitis B surface protein in one of its S,S-preS1, S-preS2 or S-preS2-preS1 forms or alternatively a protein of a hepatitis A virus, or of a hepatitis non-A, non-B virus, such as a hepatitis C, E or delta virus.

[0247] More particularly, a viral antigen as defined above will be the whole or part of one of the glycoproteins encoded by the genome of the HIV-1 virus (patents GB 8324800, EP 84401834 or EP 85905513) or of the HIV-2 virus (EP 87400151), and in particular the whole or part of a protein selected from gag, pol, nef or env of HIV-1 or HIV-2.

[0248] The methods for synthesizing the hybrid molecules include the methods used in genetic engineering to construct hybrid polynucleotides encoding the desired polypeptide sequences. Reference may be advantageously made, for example, to the technique for the production of genes encoding fusion proteins described by Minton in 1984.

[0249] Said hybrid polynucleotides encoding a hybrid polypeptide as well as the hybrid polypeptides according to the invention characterized in that they are recombinant proteins obtained by the expression of said hybrid polynucleotides also form part of the invention.

[0250] The polypeptides according to the invention may advantageously be used in a method for the in vitro detection of antibodies directed against said polypeptides, in particular the polypeptide DP428, and also of antibodies directed against a bacterium of the Mycobacterium tuberculosis complex, in a biological sample (biological tissue or fluid) capable of containing them, this method comprising bringing this biological sample into contact with a polypeptide according to the invention under conditions allowing an immunological reaction in vitro between said polypeptide and the antibodies which may be present in the biological sample, and detecting in vitro the antigen-antibody complexes which may be formed.

[0251] The polypeptides according to the invention may also and advantageously be used in a method for the detection of an infection by a bacterium of the Mycobacterium tuberculosis complex in a mammal based on the in vitro detection of a cellular reaction indicating prior sensitization of the mammal to said polypeptide such as for example cell proliferation, the synthesis of proteins such as interferon-gamma. This method for the detection of an infection by a bacterium of the Mycobacterium tuberculosis complex in a mammal is characterized in that it comprises the following steps:

[0252] a) preparation of a biological sample containing cells of said mammal, more particularly cells of the immune system of said mammal and still more particularly T cells;

[0253] b) incubation of the biological sample of step a) with a polypeptide according to the invention;

[0254] c) detection of a cellular reaction indicating prior sensitization of the mammal to said polypeptide such as for example cell proliferation and/or the synthesis of proteins such as interferon-gamma.

[0255] Cell proliferation may be measured, for example, by incorporation of ³H-Thymidine.

[0256] Also forming part of the invention are the methods for the detection of a delayed hypersensitivity reaction (DTH), characterized in that they use a polypeptide according to the invention.

[0257] Preferably, the biological sample consists of a fluid, for example a human or animal serum, blood, biopsies, bronchoalveolar fluid or pleural fluid.

[0258] Any conventional procedure may be used to carry out such a detection.

[0259] By way of example, a preferred method uses immunoenzymatic procedures such as the ELISA, immunofluorescence or radioimmunoassay (RIA) technique and the like.

[0260] Thus, the invention also relates to the polypeptides according to the invention, labeled with the aid of a suitable marker of the enzymatic, fluorescent or radioactive type.

[0261] Such methods comprise, for example, the following steps:

[0262] deposition of predetermined quantities of a polypeptide composition according to the invention into the wells of a microtiter plate,

[0263] introduction into said wells of increasing dilutions of serum or of another biological sample as defined above, before being analyzed,

[0264] incubation of the microplate,

[0265] introduction into the wells of the microtiter plate of labeled antibodies directed against human or animal immunoglobulins, the labeling of these antibodies having been carried out with the aid of an enzyme selected from those which are capable of hydrolyzing a substrate while modifying its radiation absorption, at least at a defined wavelength, for example at 550 nm,

[0266] detection, by comparing with a control, of the quantity of substrate hydrolyzed.

[0267] The invention also relates to a box or kit for the in vitro diagnosis of an infection by a mycobacterium belonging to the Mycobacterium tuberculosis complex, comprising:

[0268] a polypeptide according to the invention,

[0269] where appropriate, the reagents for constituting the medium which is appropriate for the immunological or specific reaction,

[0270] the reagents allowing the detection of the antigen-antibody complexes produced by the immunological reaction which may be present in the biological sample, and the in vitro detection of the antigen-antibody complexes which may be formed, it being possible for these reagents to also carry a marker, or to be capable of being recognized in turn by a labeled reagent, more particularly in the case where the polypeptide according to the invention is not labeled,

[0271] where appropriate, a reference biological sample (negative control) free of antibodies recognized by a polypeptide according to the invention,

[0272] where appropriate, a reference biological sample (positive control) containing a predetermined quantity of antibodies recognized by a polypeptide according to the invention.

[0273] The polypeptides according to the invention make it possible to prepare monoclonal or polyclonal antibodies which are characterized in that they recognize specifically the polypeptides according to the invention. The monoclonal antibodies may be advantageously prepared from hybridomas according to the technique described by Kohler and Milstein in 1975. The polyclonal antibodies may be prepared, for example, by immunizing an animal, in particular a mouse, with a polypeptide according to the invention combined with an immune response adjuvant, and then purifying the specific antibodies contained in the serum of the immunized animals on an affinity column to which the polypeptide which served as antigen has been attached beforehand. The polyclonal antibodies according to the invention may also be prepared by purifying an affinity column, to which there have been immobilized beforehand a polypeptide according to the invention, antibodies contained in the serum of patients infected with a mycobacterium and preferably a bacterium belonging to the Mycobacterium tuberculosis complex.

[0274] The subject of the invention is also mono- or polyclonal antibodies or fragments thereof, or chimeric antibodies, characterized in that they are capable of recognizing specifically a polypeptide according to the invention.

[0275] The antibodies of the invention may also be labeled in the same manner as described above for the nucleic probes of the invention, such as a labeling of the enzymatic, fluorescent or radioactive type.

[0276] The invention relates, in addition, to a method for the specific detection of the presence of an antigen of a mycobacterium and preferably a bacterium of the Mycobacterium tuberculosis complex in a biological sample, characterized in that it comprises the following steps:

[0277] a) bringing the biological sample (biological tissue or fluid) collected from an individual into contact with a mono- or polyclonal antibody according to the invention, under conditions allowing an immunological reaction in vitro between said antibodies and the polypeptides specific to mycobacteria and preferably bacteria of the Mycobacterium tuberculosis complex which may be present in the biological sample, and

[0278] b) detection of the antigen-antibody complex formed.

[0279] Also coming within the scope of the invention is a box or kit for the in vitro diagnosis, on a biological sample, of the presence of strains of mycobacteria and preferably of bacteria belonging to the Mycobacterium tuberculosis complex, preferably M. tuberculosis, characterized in that it comprises:

[0280] a polyclonal or monoclonal antibody according to the invention, labeled where appropriate;

[0281] where appropriate, a reagent for constituting the medium which is appropriate for carrying out the immunological reaction;

[0282] a reagent allowing the detection of the antigen-antibody complexes produced by the immunological reaction, it being possible for this reagent to also carry a marker, or to be capable of being recognized in turn by a labeled reagent, more particularly in the case where said monoclonal or polyclonal antibody is not labeled;

[0283] where appropriate, reagents for carrying out the lysis of the cells of the sample tested.

[0284] The subject of the present invention is also a method for the detection and rapid identification of the mycobacteria and preferably of the M. tuberculosis bacteria in a biological sample, characterized in that it comprises the following steps:

[0285] a) isolation of the DNA from the biological sample to be analyzed, or production of a cDNA from the RNA of the biological sample;

[0286] b) specific amplification of the DNA of mycobacteria and preferably of bacteria belonging to the Mycobacterium tuberculosis complex with the aid of primers according to the invention;

[0287] c) analysis of the products of amplification.

[0288] The products of amplification may be analyzed by various methods.

[0289] Two methods of analysis are given by way of example below:

[0290] agarose gel electrophoretic analysis of the products of amplification. The presence of a DNA fragment which migrates to the expected position suggests that the sample analyzed contained DNA of mycobacteria belonging to the tuberculosis complex, or

[0291] analysis by the molecular hybridization technique using a nucleic probe according to the invention. This probe will be advantageously labeled with a nonradioactive (cold probe) or radioactive element.

[0292] For the purposes of the present invention, “DNA of the biological sample” or “DNA contained in the biological sample” is understood to mean either the DNA present in the biological sample considered, or the cDNA obtained after the action of a reverse transcriptase-type enzyme on the RNA present in said biological sample.

[0293] Another method of the present invention allows the detection of an infection by a mycobacterium and preferably a bacterium of the Mycobacterium tuberculosis complex in a mammal. This method comprises the following steps:

[0294] a) preparation of a biological sample containing cells of said mammal, more particularly cells of the immune system of said mammal and still more particularly T cells;

[0295] b) incubation of the biological sample of step a) with a polypeptide according to the invention;

[0296] c) detection of a cellular reaction indicating prior sensitization of the mammal to said polypeptide in particular cell proliferation and/or the synthesis of proteins such as interferon-gamma;

[0297] d) detection of a reaction of delayed hypersensitivity or of sensitization of the mammal to said polypeptide.

[0298] This method of detection is an intradermal method which is described for example by M. J. Elhay et al. (1988) Infection and Immunity, 66(7): 3454-3456.

[0299] Another aim of the present invention consists in a method for the detection of the mycobacteria and preferably the bacteria belonging to the Mycobacterium tuberculosis complex in a biological sample, characterized in that it comprises the following steps:

[0300] a) bringing an oligonucleotide probe according to the invention into contact with a biological sample, the DNA contained in the biological sample, or the cDNA obtained by reverse transcription of the RNA of the biological sample, having, where appropriate, been made accessible to the hybridization beforehand, under conditions allowing the hybridization of the probe with the DNA or the cDNA of the mycobacteria and preferably of the bacteria of the Mycobacterium tuberculosis complex;

[0301] b) detection of the hybrid formed between the oligonucleotide probe and the DNA of the biological sample.

[0302] The invention also relates to a method for the detection of the mycobacteria and preferably of the bacteria belonging to the Mycobacterium tuberculosis complex in a biological sample, characterized in that it comprises the following steps:

[0303] a) bringing an oligonucleotide probe according to the invention, immobilized on a support, into contact with a biological sample, the DNA of the biological sample having, where appropriate, been made accessible to the hybridization beforehand, under conditions allowing the hybridization of said probe with the DNA of the mycobacteria and preferably of the bacteria of the Mycobacterium tuberculosis complex;

[0304] b) bringing the hybrid formed between said oligonucleotide probe immobilized on a support and the DNA contained in the biological sample, where appropriate after removal of the DNA of the biological sample which has not hybridized with the probe, into contact with a labeled oligonucleotide probe according to the invention.

[0305] According to an advantageous embodiment of the method of detection defined above, it is characterized in that, prior to step a), the DNA of the biological sample is amplified beforehand with the aid of a pair of primers according to the invention.

[0306] Another embodiment of the method of detection according to the invention consists in a method for the detection of the presence of the mycobacteria and preferably the bacteria belonging to the Mycobacterium tuberculosis complex in a biological sample, characterized in that it comprises the following steps:

[0307] a) bringing the biological sample into contact with a pair of primers according to the invention, the DNA contained in the sample having been, where appropriate, made accessible to hybridization beforehand, under conditions allowing hybridization of said primers with the DNA of the mycobacteria and preferably of the bacteria of the Mycobacterium tuberculosis complex;

[0308] b) amplification of the DNA of a mycobacterium and preferably of a bacterium of the Mycobacterium tuberculosis complex;

[0309] c) detection of the amplification of the DNA fragments corresponding to the fragment flanked by the primers, for example by gel electrophoresis or by means of an oligonucleotide probe according to the invention.

[0310] A subject of the invention is also a method for the detection of the presence of the mycobacteria and preferably the bacteria belonging to the Mycobacterium tuberculosis complex in a biological sample by strand displacement, characterized in that it comprises the following steps:

[0311] a) bringing the biological sample into contact with two pairs of primers according to the invention specifically intended for amplification of the SDA type described above, the DNA content in the sample having been, where appropriate, made accessible to hybridization beforehand, under conditions allowing hybridization of the primers with the DNA of the mycobacteria and preferably the bacteria of the Mycobacterium tuberculosis complex;

[0312] b) amplification of the DNA of the mycobacteria and preferably of the bacteria of the Mycobacterium tuberculosis complex;

[0313] c) detection of the amplification of DNA fragments corresponding to the fragment flanked by the primers, for example by gel electrophoresis or by means of an oligonucleotide probe according to the invention.

[0314] The invention also relates to a box or kit for carrying out the method described above, intended for the detection of the presence of the mycobacteria and preferably the bacteria of the Mycobacterium tuberculosis complex in a biological sample, characterized in that it comprises the following components:

[0315] a) an oligonucleotide probe according to the invention;

[0316] b) the reagents necessary for carrying out a hybridization reaction;

[0317] c) where appropriate, a pair of primers according to the invention as well as the reagents necessary for a reaction of amplification of the DNA (genomic DNA, plasmid DNA or cDNA) of mycobacteria and preferably of bacteria of the Mycobacterium tuberculosis complex.

[0318] The subject of the invention is also a kit or box for the detection of the presence of the mycobacteria and preferably the bacteria of the Mycobacterium tuberculosis complex in a biological sample, characterized in that it comprises the following components:

[0319] a) an oligonucleotide probe, termed capture probe, according to the invention;

[0320] b) an oligonucleotide probe, termed revealing probe, according to the invention;

[0321] c) where appropriate, a pair of primers according to the invention as well as the reagents necessary for a reaction of amplification of the DNA of mycobacteria and preferably of bacteria of the Mycobacterium tuberculosis complex.

[0322] The invention also relates to a kit or box for the amplification of the DNA of the mycobacteria and preferably the bacteria of the Mycobacterium tuberculosis complex present in a biological sample, characterized in that it comprises the following components:

[0323] a) a pair of primers according to the invention;

[0324] b) the reagents necessary for carrying out a DNA amplification reaction;

[0325] c) optionally, a component which makes it possible to verify the sequence of the amplified fragment, more particularly an oligonucleotide probe according to the invention.

[0326] Another subject of the present invention relates to an immunogenic composition, characterized in that it comprises a polypeptide according to the invention.

[0327] Another immunogenic composition according to the invention is characterized in that it comprises one or more polypeptides according to the invention and/or one or more hybrid polypeptides according to the invention.

[0328] According to an advantageous embodiment, the above-defined immunogenic composition constitutes a vaccine when it is provided in combination with a pharmaceutically acceptable vehicle and optionally one or more immunity adjuvants such as alum or a representative of the family of muramyl peptides or alternatively incomplete Freund's adjuvant.

[0329] Various types of vaccine are currently available for protecting humans against infectious diseases: attenuated live microorganisms (M. bovis-BCG for tuberculosis), inactivated microorganisms (influenza virus), acellular extracts (Bordetella pertussis for whooping cough), recombinant proteins (hepatitis B virus surface antigen), polysaccharides (pneumococci). Experiments are being carried out on vaccines prepared from synthetic peptides or genetically modified microorganisms expressing heterologous antigens. More recently still, recombinant plasmid DNAs carrying genes encoding protective antigens have been proposed as an alternative vaccine strategy. This type of vaccination is carried out with a specific plasmid which is derived from an E. coli plasmid which does not replicate in vivo and which encodes only the vaccinal protein. The principal functional components of this plasmid are: a strong promoter allowing expression in eukaryotic cells (for example that of CMV), an appropriate cloning site for inserting the gene of interest, a termination-polyadenylation sequence, a prokaryotic replication origin for producing the recombinant plasmid in vitro and a selectable marker (for example the ampicillin-resistance gene) for facilitating the selection of the bacteria which contain the plasmid. Animals were immunized by simply injecting the naked plasmid DNA into the muscle. This technique leads to the expression of the vaccinal protein in situ and to an immune response in particular of the cellular type (CTL) and of the humoral type (antibody). This double induction of the immune response is one of the main advantages of the vaccination technique with naked DNA. Huygen et al. (1996) and Tascon et al. (1996) succeeded in obtaining a degree of protection against M. tuberculosis by injecting recombinant plasmids containing M. leprae genes (hsp65, 36 kDa pra) as inserts. M. leprae is the agent responsible for leprosy. The use of an insert specific to M. tuberculosis such as, for example, the whole or part of the DP428 gene, which is the subject of the present invention, would probably lead to a better protection against tuberculosis. The whole or part of the DP428 gene, or any polynucleotide according to the invention, can be easily inserted into the plasmid vectors V1J (Montgomery et al., 1993), pcDNA3 (Invitrogen, R & D Systems) or pcDNA1/Neo (Invitrogen) which possess the necessary characteristics for a vaccinal use.

[0330] The invention thus relates to a vaccine, characterized in that it comprises one or more polypeptides according to the invention and/or one or more hybrid polypeptides according to the invention as previously defined, in combination with a pharmaceutically compatible vehicle and, where appropriate, one or more appropriate immunity adjuvants.

[0331] The invention also relates to a vaccine composition intended for the immunization of humans or animals against a bacterial or viral infection, such as tuberculosis or hepatitis, characterized in that it comprises one or more hybrid polypeptides as previously defined in combination with a pharmaceutically compatible vehicle and, where appropriate, one or more immunity adjuvants.

[0332] Advantageously, in the case of a protein which is a hybrid between a polypeptide according to the invention and the hepatitis B surface antigen, the vaccine composition will be administered, in humans, in an amount of 0.1 to 1 μg of purified hybrid protein per kilogram of the weight of the patient, preferably 0.2 to 0.5 μg/kg of the weight of the patient, for a dose intended for a given administration. In the case of patients suffering from disorders of the immune system, in particular immunosuppressed patients, each injected dose will preferably contain half of the quantity, by weight, of the hybrid protein contained in a dose intended for a patient not suffering from immune system disorders.

[0333] Preferably, the vaccine composition will be administered several times, spread out over time, by the intradermal or subcutaneous route. By way of example, three doses as defined above will be administered, respectively, to the patient at time t0, at time t0+1 month and at time t0+1 year.

[0334] Alternatively, three doses will be administered, respectively, to the patient at time t0, at time t0+1 month and at time t0+6 months.

[0335] In mice, in which a weight dose of the vaccine composition comparable to the dose used in humans is administered, the antibody reaction is tested by collecting serum followed by a study of the formation of a complex between the antibodies present in the serum and the antigen of the vaccine composition, according to the customary techniques.

[0336] The invention also relates to an immunogenic composition characterized in that it comprises a polynucleotide or an expression vector according to the invention, in combination with a vehicle allowing its administration to humans or animals.

[0337] The subject of the invention is also a vaccine intended for immunizing against a bacterial or viral infection, such as tuberculosis or hepatitis, characterized in that it comprises a polynucleotide or an expression vector according to the invention, in combination with a pharmaceutically acceptable vehicle.

[0338] Such immunogenic or vaccine compositions are in particular described in international application No. WO 90/11092 (Vical Inc.) and also in international application No. WO 95/11307 (Institut Pasteur).

[0339] The constituent polynucleotide of the immunogenic composition or of the vaccine composition according to the invention may be injected into the host after having been coupled with compounds which promote the penetration of this polynucleotide into the cell or its transport to the cell nucleus. The resulting conjugates may be encapsulated into polymer microparticles, as described in international application No. WO 94/27238 (Medisorb Technologies International).

[0340] According to another embodiment of the immunogenic and/or vaccine composition according to the invention, the polynucleotide, preferably a DNA, is complexed with DEAE-dextran (Pagano et al., 1967) or with nuclear proteins (Kaneda et al., 1989), with lipids (Felgner et al., 1987) or encapsulated into liposomes (Fraley et al., 1980).

[0341] According to yet another advantageous embodiment of the immunogenic and/or vaccine composition according to the invention, the polynucleotide according to the invention may be introduced in the form of a gel facilitating its transfection into cells. Such a composition in gel form may be a poly-L-lysine and lactose complex, as described by Midoux in 1993, or Poloxamer 407™, as described by Pastore in 1994. The polynucleotide or the vector according to the invention may also be in suspension in a buffer solution or may be combined with liposomes.

[0342] Advantageously, such a vaccine will be prepared in accordance with the technique described by Tacson et al. or Huygen et al. in 1996 or in accordance with the technique described by Davis et al. in international application No. WO 95/11307 (Whalen et al.).

[0343] Such a vaccine will be advantageously prepared in the form of a composition containing a vector according to the invention, placed under the control of regulatory elements allowing its expression in humans or animals.

[0344] To produce such a vaccine, the polynucleotide according to the invention is first of all subcloned into an appropriate expression vector, particularly an expression vector containing regulatory and expression signals recognized by the enzymes in eukaryotic cells and also containing a replication origin which is active in prokaryotes, for example in E. coli, which allows its prior amplification. The purified recombinant plasmid obtained is then injected into the host, for example by the intramuscular route.

[0345] It will be possible, for example, to use as vector for expressing in vivo the antigen of interest the plasmid pcDNA3 or the plasmid pcDNA1/neo, both marketed by Invitrogen (R&D Systems, Abingdon, United Kingdom). It is also possible to use the plasmid V1Jns.tPA described by Shiver et al. in 1995.

[0346] Such a vaccine will advantageously comprise, in addition to the recombinant vector, a saline solution, for example a sodium chloride solution.

[0347] A vaccine composition as defined above will be, for example, administered by the parenteral route or by the intramuscular route.

[0348] The present invention also relates to a vaccine characterized in that it contains one or more nucleotide sequences according to the invention and/or one or more polynucleotides as mentioned above in combination with a pharmaceutically compatible vehicle and, where appropriate, one or more appropriate immunity adjuvants.

[0349] Another aspect relates to a method of screening molecules capable of inhibiting the growth of mycobacteria or the maintenance of mycobacteria in a host, characterized in that said molecules block the synthesis or the function of the polypeptides encoded by a nucleotide sequence according to the invention or by a polynucleotide as described supra.

[0350] In said method of screening, the molecules may be anti-messengers or may induce the synthesis of anti-messengers.

[0351] The present invention also relates to molecules capable of inhibiting the growth of mycobacteria or the maintenance of mycobacteria in a host, characterized in that said molecules are synthesized based on the structure of the polypeptides encoded by a nucleotide sequence according to the invention or by a polynucleotide as described supra.

[0352] Other characteristics and advantages of the invention appear in the following examples and figures:

### FIGURES

The FIG. 1 Series:

[0353] The FIG. 1 series illustrates the series of nucleotide sequences SEQ ID NOS: 1, 8, 14, 25, 31, and 33 corresponding to the insert of the vector pDP428 (deposited at the CNCM under the No. I-1818) and the series of amino acid sequences SEQ ID NOS: 2-7, 9-13, 15-24, 26-30, 32, 34 of the polypeptides encoded by the series of nucleotide sequences SEQ ID NOS: 1, 8, 14, 25, 31, and 33.

FIG. 2:

[0354] Illustrates the nucleotide sequence SEQ ID NO: 35 corresponding to the region including the gene encoding the polypeptide DP428 (region underlined). Both the ATG and GTG codons for initiation of translation were taken into account in this figure. The figure shows that the polypeptide DP428 is probably part of an operon comprising at least three genes. The double-boxed region probably includes the promoter regions.

[0355] The single-boxed region corresponds to the motif LPISG (SEQ ID NO: 934) which resembles the motif LPXTG (SEQ ID NO: 935) described in Gram-positive bacteria as allowing anchorage to peptidoglycans.

The FIG. 3 Series:

[0356] The FIG. 3 series represents the series of nucleotide sequences SEQ ID NOS: 41, 46, 52 corresponding to the insert of the vector p6D7 (deposited at the CNCM under the No. I-1814) and the series of amino acid sequences SEQ ID NOS: 42-45, 47-51, and 53-55.

The FIG. 4 Series:

[0357] The FIG. 4 series represents the series of nucleotide sequences SEQ ID NOS: 56, 62, 64, 67, 69, 72, 74, 76, 78, 81, 84, and 86 corresponding to the insert of the vector p5A3 (deposited at the CNCM under the No. I-1815) and the series of amino acid sequences SEQ ID NOS: 57-61, 63, 65-66, 68, 70-71, 73, 75, 77, 79-80, 82-83, 85, and 87.

The FIG. 5 Series:

[0358] The FIG. 5 series represents the series of nucleotide sequences SEQ ID NOS: 88, 90, 92, 96, 98, 100, 104, 106, and 108 corresponding to the insert of the vector p5F6 (deposited at the CNCM under the No. I-1816) and the series of amino acid sequences SEQ ID NOS: 93-95, 97, 99, 101-103, 105, 107, and 109.

The FIG. 6 Series:

[0359] The FIG. 6 series represents the series of nucleotide sequences SEQ ID NOS: 110, 113, and 119 corresponding to the insert of the vector p2A29 (deposited at the CNCM under the No. I-1817) and the series of amino acid sequences SEQ ID NOS: 111-112, 114-118, and 120-121.

The FIG. 7 Series:

[0360] The FIG. 7 series represents the series of nucleotide sequences SEQ ID NOS: 122, 128, and 133 corresponding to the insert of the vector p5B5 (deposited at the CNCM under the No. I-1819) and the series of amino acid sequences SEQ ID NOS: 123-127, 129-132, and 134-136.

The FIG. 8 Series:

[0361] The FIG. 8 series represents the series of nucleotide sequences SEQ ID NOS: 137, 139, 141, 143, 145, 148, 150, 152, 154, and 156 corresponding to the insert of the vector p1C7 (deposited at the CNCM under the No. I-1820) and the series of amino acid sequences SEQ ID NOS: 138, 272-273, 140, 142, 144, 146-147, 149, 151, 153, 155, and 157.

The FIG. 9 Series:

[0362] The FIG. 9 series represents the series of nucleotide sequences SEQ ID NOS: 158, 160, and 162 corresponding to the insert of the vector p2D7 (deposited at the CNCM under the No. I-1821) and the series of amino acid sequences SEQ ID NOS: 159, 161, 163, and 164.

The FIG. 10 Series:

[0363] The FIG. 10 series represents the series of nucleotide sequences SEQ ID NOS: 165, 169, and 177 corresponding to the insert of the vector p1B7 (deposited at the CNCM under the No. I-1843) and the series of amino acid sequences SEQ ID NOS: 166-168, 170-176, 178-183.

The FIG. 11 Series:

[0364] The FIG. 11 series represents the series of nucleotide sequences SEQ ID NOS: 184, 189, 195, 200, 202, 206, 209, and 211 and the series of amino acid sequences SEQ ID NOS: 185-188, 190-194, 196-199, 201, 203-205, 207-208, 210, and 212.

The FIG. 12 Series:

[0365] The FIG. 12 series represents the series of nucleotide sequences SEQ ID NOS: 213, 217, and 220 and the series of amino acid sequences SEQ ID NOS: 214-216, 218-219, and 221-224.

The FIG. 13 Series:

[0366] The FIG. 13 series represents the series of nucleotide sequences SEQ ID NOS: 225, 228, 238, 246, 250, 255, 258, and 260 and the series of amino acid sequences SEQ ID NOS: 226-227, 923-925, 229-237, 239-245, 247-249, 251-254, 256-257, 259, and 261.

The FIG. 14 Series:

[0367] The FIG. 14 series represents the series of nucleotide sequences SEQ ID NOS: 262, 268, 274, 278, 280, 282, 284, 286, 288, 297, 290, and 310 corresponding to the insert of the vector p5B5 (deposited at the CNCM under the No. I-1819) and the series of amino acid sequences SEQ ID NOS: 263-267, 269-271, 275-277, 279, 281, 283, 285, 287, 289, 291-296, 298-309, and 311-316.

The FIG. 15 Series:

[0368] The FIG. 15 series represents the series of nucleotide sequences SEQ ID NOS: 317, 321, 323, 325, 327, 331, 333, 335, 337, 339, 346, and 347 and the series of amino acid sequences SEQ ID NOS: 318-320, 322, 324, 326, 328-330, 332, 334, 336, 338, 340-345, and 348-352.

The FIG. 16 Series:

[0369] The FIG. 16 series represents the series of nucleotide sequences SEQ ID NOS: 353, 357, and 359 and the series of amino acid sequences SEQ ID NOS: 354-356, 358, 360, and 926-930.

The FIG. 17 Series:

[0370] The FIG. 17 series represents the series of nucleotide sequences SEQ ID NOS: 361, 364, 368, 371, 374, 380, 383, and 385 and the series of amino acid sequences SEQ ID NOS: 362-363, 365-367, 369-370, 372, 373, 375-379, 381-382, 384, and 386.

The FIG. 18 Series:

[0371] The FIG. 18 series represents the series of nucleotide sequences SEQ ID NOS: 387, 389, 393, 395, 397, 399, 403, and 405 and the series of amino acid sequences SEQ ID NOS: 388, 390-392, 394, 396, 398, 400-402, 404, and 406.

The FIG. 19 Series:

[0372] The FIG. 19 series represents the series of nucleotide sequences SEQ ID NOS: 407, 410, 412, 419, 421, 426, 429, and 431 and the series of amino acid sequences SEQ ID NOS: 408-409, 411, 413-418, 420, 422-425, 427-428, 430, and 432.

The FIG. 20 Series:

[0373] The FIG. 20 series represents the series of nucleotide sequences SEQ ID NOS: 433, 437, 441, 447, 452, 456, 459, and 461 corresponding to the insert of the vector p2A29 (deposited at the CNCM under the No. I-1817) and the series of amino acid sequences SEQ ID NOS: 434-436, 438-440, 442-446, 448-451, 453-455, 457-458, 460, and 462.

The FIG. 21 Series:

[0374] The FIG. 21 series represents the series of nucleotide sequences SEQ ID NOS: 463, 469, 472, 474, 476, 482, 485, and 487 and the series of amino acid sequences SEQ ID NOS: 464-468, 470, 471, 473, 475, 477-481, 483-484, 486, and 488.

The FIG. 22 Series:

[0375] The FIG. 22 series represents the series of nucleotide sequences SEQ ID NOS: 489, 495, and 497 and the series of amino acid sequences SEQ ID NOS: 490-494, 496, and 498-500.

The FIG. 23 Series:

[0376] The FIG. 23 series represents the series of nucleotide sequences SEQ ID NOS: 501, 505, and 510 and the series of amino acid sequences SEQ ID NOS: 502-504, 506-509, and 511-515.

The FIG. 24 Series:

[0377] The FIG. 24 series represents the series of nucleotide sequences SEQ ID NOS: 516, 519, and 522 and the series of amino acid sequences SEQ ID NOS: 517-518, 520-521, and 523-527.

FIGS. 25 and 26:

[0378] FIGS. 25 and 26 illustrate, respectively, the sequences SEQ ID NO: 528 and SEQ ID NO: 529 representing a pair of primers used to specifically amplify, by PCR, the region corresponding to nucleotides 964 to 1234 included in the sequence SEQ ID NOS: 1, 8, 14, 25, 31, and 33.

The FIG. 27 Series:

[0379] The FIG. 27 series represents the series of nucleotide sequences SEQ ID NOS: 530, 534, and 537 corresponding to the insert of the vector p5A3 and the series of amino acid sequences SEQ ID NOS: 531-533, 535-536, and 538-542.

FIG. 28:

[0380] The amino acid sequence as defined in FIG. 28 represents the amino acid sequence SEQ ID NO: 543 corresponding to the polypeptide DP428.

FIG. 29:

[0381] FIG. 29 represents the nucleotide sequence SEQ ID NO: 544 of the complete gene encoding the M1C25 protein.

FIG. 30:

[0382] FIG. 30 represents the amino acid sequence SEQ ID NO: 545 of the M1C25 protein.

The FIG. 31 Series:

[0383] The FIG. 31 series represents the series of nucleotide sequences SEQ ID NOS: 546, 550, 552, and 554 and the series of amino acid sequences SEQ ID NOS: 547-549, 551, 553, and 555.

The FIG. 32 Series:

[0384] The FIG. 32 series represents the series of nucleotide sequences SEQ ID NOS: 556, 558, 564, 569, and 571 and the series of amino acid sequences SEQ ID NOS: 557, 559-563, 565-568, 570, and 572.

The FIG. 33 Series:

[0385] The FIG. 33 series represents the series of nucleotide sequences SEQ ID NOS: 573, 576, 580, 584, and 586 and the series of amino acid sequences SEQ ID NOS: 574-575, 577-579, 581-583, 585, and 587.

The FIG. 34 Series:

[0386] The FIG. 34 series represents the series of nucleotide sequences SEQ ID NOS: 588, 590, 594, and 596 and the series of amino acid sequences SEQ ID NOS: 587, 589, 591-593, 595, and 597.

The FIG. 35 Series:

[0387] The FIG. 35 series represents the series of nucleotide sequences SEQ ID NOS: 598, 600, 604, 608, and 610 and the series of amino acid sequences SEQ ID NOS: 599, 601-603, 605-607, 609, and 611.

The FIG. 36 Series:

[0388] The FIG. 36 series represents the series of nucleotide sequences SEQ ID NOS: 612, 614, 616, 618, and 620 and the series of amino acid sequences SEQ ID NOS: 613, 615, 617, 619, and 621.

The FIG. 37 Series:

[0389] The FIG. 37 series represents the series of nucleotide sequences SEQ ID NOS: 622, 624, 626, 629, and 631 and the series of amino acid sequences 623, 625, 627-628, 630, and 632.

The FIG. 38 Series:

[0390] The FIG. 38 series represents the series of nucleotide sequences SEQ ID NOS: 633, 635, 640, 647, and 649, and the series of amino acid sequences SEQ ID NOS: 634, 636-639, 641-646, 648, and 650.

The FIG. 39 Series:

[0391] The FIG. 39 series represents the series of nucleotide sequences SEQ ID NOS: 651, 653, 657, 660, and 662 and the series of amino acid sequences SEQ ID NOS: 652, 654-656, 658-659, 661, and 663.

The FIG. 40 Series:

[0392] The FIG. 40 series represents the series of nucleotide sequences SEQ ID NOS: 664, 666, 669, 674, and 676, and the series of amino acid sequences SEQ ID NOS: 665, 931-933, 667-668, 670-673, 675, and 677.

The FIG. 41 Series:

[0393] The FIG. 41 series represents the series of nucleotide sequences SEQ ID NOS: 678, 683, 686, 691, 693, 695, 697, 702, and 717 corresponding to the insert of the vector p2D7 (deposited at the CNCM under the No. I-1821) and the series of amino acid sequences SEQ ID NOS: 679-682, 684, 685, 687-690, 692, 694, 696, 698-701, 703-716, and 718-727.

The FIG. 42 Series:

[0394] The FIG. 42 series represents the series of nucleotide sequences SEQ ID NOS: 728, 733, 736, 739, and 741 and the series of amino acid sequences SEQ ID NOS: 729-732, 734-735, 737-738, 740, and 742.

The FIG. 43 Series:

[0395] The FIG. 43 series represents the series of nucleotide sequences SEQ ID NOS: 743, 746, 752, 755, and 757 and the series of amino acid sequences SEQ ID NOS: 744-745, 747-751, 753-754, 756, and 758.

The FIG. 44 Series:

[0396] The FIG. 44 series represents the series of nucleotide sequences SEQ ID NOS: 759, 761, 764, 767, and 769, and the series of amino acid sequences SEQ ID NOS: 760, 762, 763, 765-766, 768, and 770.

The FIG. 45 Series:

[0397] The FIG. 45 series represents the series of nucleotide sequences SEQ ID NOS: 771, 784, 794, 805, 807, and 809 and the series of amino acid sequences SEQ ID NOS: 772-783, 785-793, 795-804, 806, 808, and 810.

The FIG. 46 Series:

[0398] The FIG. 46 series represents the series of nucleotide sequences SEQ ID NOS: 811, 813, 817, 821, and 823 and the series of amino acid sequences SEQ ID NOS: 812, 814-816, 818-820, 822, and 824.

The FIG. 47 Series:

[0399] The FIG. 47 series represents the series of nucleotide sequences SEQ ID NOS: 825, 827, 831, 833, and 835 and the series of amino acid sequences SEQ ID NOS: 826, 828-830, 832, 834, and 836.

The FIG. 48 Series:

[0400] The FIG. 48 series represents the series of nucleotide sequences SEQ ID NOS: 837, 839, 842, 844, and 846 and the series of amino acid sequences SEQ ID NOS: 838, 840-841, 843, 845, and 847.

The FIG. 49 Series:

[0401] The FIG. 49 series represents the series of nucleotide sequences SEQ ID NOS: 848, 864, 878, 883, and 885 and the series of amino acid sequences SEQ ID NOS: 849-863, 865-877, 879, 880-882, 884, and 886.

The FIG. 50 Series:

[0402] The FIG. 50 series represents the series of nucleotide sequences SEQ ID NOS: 887, 895, 901, 907, and 909 and the series of amino acid sequences SEQ ID NOS: 888-894, 896-900, 902-906, 908, and 910.

FIG. 51:

[0403] A. Construct pJVED: shuttle plasmid (capable of multiplying in mycobacteria as well as in E. coli) with a kanamycin-resistance gene (derived from Tn903) as a selectable marker. The truncated phoA gene (A phoA) and the luc gene form a synthetic operon.

[0404] B. Joining sequence (SEQ ID NO: 922) between phoA and luc.

FIG. 52:

[0405] Genomic hybridization (Southern blotting) of the genomic DNA of various mycobacterial species with the aid of an oligonucleotide probe whose sequence is the sequence between the nucleotide at position nt 964 (5′ end of the probe) and the nucleotide at position nt 1234 (3′ end of the probe), ends included, of the sequence SEQ ID NOS: 1, 8, 14, 25, 31, and 33.

FIGS. 53 and 54:

[0406] Recombinant M. smegmatis Luc and PhoA activities containing pJVED with various nucleotide fragments as described in the examples. FIGS. 52 and 53 represent the results obtained for two separate experiments carried out under the same conditions.

FIG. 55:

[0407] Representation of the hydrophobicity (Kyte and Doolitle) of the coding sequence of the polypeptide DP428 with its schematic representation. The LPISG (SEQ ID NO: 934) motif immediately precedes the hydrophobic C-terminal region. The sequence ends with two arginines.

FIG. 56:

[0408] Representation of the hydrophobicity (Kyte and Doolitle) of the sequence of the polypeptide M1C25 having the amino acid sequence SEQ ID NO: 545.

FIG. 57:

[0409] A-Acrylamide gel (12%) under denaturing conditions of a bacterial extract obtained by sonication of E. coli M15 bacteria containing the plasmid pM1C25 without and after 4 hours of induction with IPTG, stained with Coomassie Blue.

[0410] Lane 1: Molecular weight marker (Prestained SDS-PAGE Standards High Range BIO-RAD®).

[0411] Lane 2: Bacterial extract obtained by sonication of E. coliM15 bacteria containing the plasmid pM1C25 without induction with IPTG.

[0412] Lane 3: Bacterial extract obtained by sonication of E. coliM15 bacteria containing the plasmid pM1C25 after 4 hours of induction with IPTG.

[0413] Lane 4: Molecular weight marker (Prestained SDS-PAGE Standards Low Range BIO-RAD®).

[0414] B—Western blotting of a similar gel (12% acrylamide) visualized by means of the penta-His antibody marketed by the company Quiagen.

[0415] Lane 1: Representation of the molecular weight marker (Prestained SDS-PAGE Standards High Range BIO-RAD®).

[0416] Lane 2: Bacterial extract obtained by sonication of E. coli M15 bacteria containing the plasmid pM1C25 without induction with IPTG.

[0417] Lane 3: Bacterial extract obtained by sonication of E. coli M15 bacteria containing the plasmid pM1C25 after 4 hours of induction with IPTG.

[0418] Lane 4: Representation of the molecular weight marker (Prestained SDS-PAGE Standards Low Range BIO-RAD®).

[0419] The band which is most predominantly present in the lanes corresponding to the bacteria induced with IPTG compared with those not induced with IPTG, between 34,200 and 28,400 daltons, corresponds to the expression of the insert M1C25 cloned into the vector pQE-60 (Qiagen®).

[0420] As regards the legend to the other figures which are numbered by an alphanumeric character, each of these other figures represents the nucleotide sequence and the amino acid sequence having the SEQ ID sequence whose numbering is identical to the alphanumeric character of each of said figures.

[0421] The alphanumeric numberings of the figures representing the SEQ IDs comprising a number followed by a letter have the following meanings:

[0422] the alphanumeric numberings having the same number relate to the same family of sequences attached to the reference SEQ ID sequence whose numbering has this same number and the letter A;

[0423] the letters A, B and C for the same family of sequences distinguish the three possible reading frames of the reference SEQ ID nucleotide sequence (A);

[0424] the letters with a prime (′) index mean that the sequence corresponds to a fragment of the reference SEQ ID sequence (A);

[0425] the letter D means that the sequence corresponds to the sequence of the gene predicted by Cole et al., 1998;

[0426] the letter F means that the sequence corresponds to the open reading frame (ORF) containing the corresponding “D” sequence according to Cole et al., 1998;

[0427] the letter G means that the sequence is a sequence predicted by Cole et al., 1998, and exhibiting a homology of more than 70% with the reference SEQ ID sequence (A);

[0428] the letter H means that the sequence corresponds to the open reading frame containing the corresponding “G” sequence according to Cole et al., 1998;

[0429] the letter R means that the sequence corresponds to a sequence predicted by Cole et al., 1998, upstream of the corresponding “D” sequence and capable of being in phase with the sequence “D” because of possible sequencing errors;

[0430] the letter P means that the sequence corresponds to the open reading phase containing the corresponding “R” sequence;

[0431] the letter Q means that the sequence corresponds to a sequence containing the corresponding “F” and “P” sequences.

[0432] As regards the sequence family SEQ ID NOS: 56-87, the preceding insert phoA contains two fragments which are noncontiguous on the genome, SEQ ID NO: 76 and SEQ ID NO: 56, and which are therefore derived from a multiple cloning allowing the expression and export of phoA. These two noncontiguous fragments, the genes and the open reading frames containing them according to Cole et al., 1998, are important for the export of an antigenic polypeptide:

[0433] the letters J, K and L distinguish the three possible reading frames of the corresponding nucleotide sequence “J”;

[0434] the letter M means that the sequence corresponds to the sequence predicted by Cole et al., 1998, and containing the sequence SEQ ID NO: 77;

[0435] the letter N means that the sequence corresponds to the open reading frame containing the sequence SEQ ID NO: 84.

[0436] As regards the sequence family SEQ ID NOS: 771-810, the letter Z means that the sequence corresponds to the sequence of a cloned fragment fused with phoA.

[0437] Finally, as regards the sequence family SEQ ID NOS: 678-727, the letter S means that the sequence corresponds to a sequence predicted by Cole et al., 1998 and which may be in the same reading frame as the corresponding sequence “D”, the letter T meaning that the corresponding sequence contains the corresponding sequences “F” and “S”.

### EXAMPLES

Materials and methods

[0438] Bacterial Cultures, Plasmids and Culture Media

[0439] E. coli was cultured on Luria-Bertani (LB) solid or liquid medium. M. smegmatis was cultured on Middlebrook 7H9 liquid medium (Difco) supplemented with albumin-dextrose (ADC), 0.2% glycerol and 0.05% Tween, or on solid L medium. If necessary, the antibiotic kanamycin was added at a concentration of 20 μg/ml. The bacterial clones having a PhoA activity were detected on LB agar containing 5-bromo-4-chloro-3-indolyl phosphate (X-P, at 40 μg/ml).

[0440] Manipulation of DNA and Sequencing

[0441] The manipulations of DNA and the Southern-blot analyses were carried out using the standard techniques (Sambrook et al., 1989). The double-stranded DNA sequences were determined with a Taq Dye Deoxy Terminator Cycle sequencing kit (Applied Biosystems), in a System 9600 GeneAmp PCR (Perkin-Elmer), and after migration on a model 373 DNA analyzing system (Applied Biosystems).

[0442] Constructions of the Plasmids

[0443] The plasmid pJVEDa was constructed from pLA71, a transfer plasmid comprising the phoA gene which is truncated and placed in phase with BlaF. pLA71 was cleaved with the restriction enzymes KpnI and NotI, thus removing phoA without affecting the promoter of BlaF The luc gene encoding the firefly luciferase was amplified from pGEM-/luc and a ribosome-binding site was added. phoA was amplified from pJEM11. The amplified fragments were cleaved with PstI and ligated together. The oligodeoxynucleotides used are the following:

(SEQ ID NO: 911)

| | |
|---|---|
| pPV.Iuc.Fw: | 5′GACTGCTGCAGAAGGAGAAGATCCAAATGG3′ |

(SEQ ID NO: 912)

| | |
|---|---|
| Iuc.Bw: | 5′GACTAGCGGCCGCGAATTCGTCGACCTCCGAGG3′ |

(SEQ ID NO: 913)

| | |
|---|---|
| pJEM.phoA.Fw: | 5′CCGCGGATCCGGATACGTAC3′ |

(SEQ ID NO: 914)

| | |
|---|---|
| phoA.Bw: | 5′GACTGCTGCAGTTTATTTCAGCCCCAGAGCG3′. |

[0444] The fragment thus obtained was reamplified using the oligonucleotides complementary to its ends, cleaved with KpnI and NotI, and integrated into pLA71 cleaved with the same enzymes. The resulting construct was electroporated into E. coli DH5α and M. smegmatis mc² 155. An M. smegmatis clone emitting light and having a phoA activity was selected and called pJVED/blaF The insert was removed using BamHI and the construct closed again on itself, thus reconstructing pJVEDₐ. To obtain pJVED_{b,c}, the multiple cloning site was cleaved with ScaI and KpnI and closed again, removing one (pJVED_{b}) or two (pJVED_{c}) nucleotides from the SnaBI site. After fusion, it was thus possible to obtain six reading frames. The insert of pJVED/hsp18 was obtained by polymerase chain amplification (PCR) of pPM1745 (Servant et al., 1995) using oligonucleotides having the sequence:

| | |
|---|---|
| 18.Fw: | |
| 5′GTACCAGTACTGATCACCCGTCTCCCGCAC3′ | (SEQ ID NO; 915) |
| 18.Back: | |
| AGTCAGGTACCTCGCGGAAGGGGTCAGTGCG3′ | (SEQ ID NO: 916) |

[0445] The product was cleaved with KpnI and ScaI, and ligated to pJVEDₐ, cleaved with the same enzymes, thus leaving pJVED/hsp18.

[0446] pJVED/P19 kDa and pJVED/erp were constructed by cleaving with BamHI the insert of pExp410 and pExp53, respectively, and inserting them into the BamHI site of the multiple cloning site of pJVEDₐ.

[0447] Measurement of the Alkaline Phosphatase Activity

[0448] The presence of activity is detected by the blue color of the colonies growing on a culture medium containing the substrate 5-bromo-4-chloro-3-indolyl phosphate (XP), and then the activity can be quantitatively measured more precisely in the following manner:

[0449] M. smegmatis was cultured in an LB medium supplemented with 0.05% Tween 80 (Aldrich) and kanamycin (20 μg/ml) at 37° C. for 24 hours. The alkaline phosphatase activity was measured by the Brockman and Heppel method (Brockman et al., 1968) in a sonicated extract, with p-nitrophenyl phosphate as reaction substrate. The quantity of proteins was measured by the Bio-Rad assay. The alkaline phosphatase activity is expressed as arbitrary units (optic density at 420 nm×μg of protein⁻¹×minutes⁻¹).

[0450] Measurement of the Luciferase Activity

[0451] M. smegmatis was cultured in an LB medium supplemented with 0.05% Tween 80 (Aldrich) and kanamycin (20 μg/ml) at 37° C. for 24 hours and used in full exponential growth (OD at 600 nm between 0.3 and 0.8). The aliquots of bacterial suspensions were briefly sonicated and the cell extract was used to measure the luciferase activity. 25 μl of the sonicated extract were mixed with 100 μl of substrate (Promega luciferase assay system) automatically in a luminometer and the emitted light expressed in RLU (Relative Light Units). The bacteria were counted by serial dilutions of the origin suspension on LB-kanamycin agar medium and the luciferase activity expressed in RLU/μg of bacterial protein or in RLU/10³ bacteria.

[0452] Construction of M. tuberculosis and M. bovis-BCG Genomic Libraries

[0453] The libraries were obtained essentially using pJVED_{a,b,c}, which are described above.

[0454] Preparation of macrophages derived from bone marrow and infection with recombinant M. smegmatis.

[0455] The macrophages derived from bone marrow were prepared as described by Lang et al., 1991. In summary, the bone marrow cells were removed from the femur of 6- to 12-week old C57BL/6 mice (Iffa-Credo, France). The cells in suspensions were washed and resuspended in DMEM enriched with 10% fetal calf serum, 10% of conditioned L-cell medium and 2 mM glutamine, without antibiotics. 10⁶ cells were inoculated on flat-bottomed 24-well Costar plates in 1 ml. After four days at 37° C. in a humid atmosphere containing a CO₂ content of 10%, the macrophages were rinsed and reincubated for an additional two to four days. The cells of a control well were lysed with triton×100 at 0.1% in water and the nuclei enumerated. About 5×10⁵ adherent cells were counted. For the infection, M. smegmatis carrying the different plasmids was cultured in full exponential phase (OD_{600 nm} between 0.4 and 0.8) and diluted to an OD of 0.1 and then 10-fold in a medium for macrophage. 1 ml was added to each well and the plates were centrifuged and incubated for four hours at 37° C. After three washes, the cells were incubated in a medium containing amikacin for two hours. After three new washes, the adherent infected cells were incubated in a macrophage medium overnight. The cells were then lysed in 0.5 ml of lysis buffer (Promega). 100 μl were sonicated and the light emitted was measured on 25 μm. Simultaneously, the bacteria were enumerated by spreading on L-agar-kanamycin (20 μg/ml). The light emitted is expressed in RLU/10³ bacteria.

[0456] Analyses of the Databanks

[0457] The nucleotide sequences were compared with EMBL and GenBank using the FASTA algorithm and the protein sequences were analyzed by similitude by means of the PIR and Swiss Prot databanks using the BLAST algorithm.

### Example 1

### The pJVED Vectors

[0458] The pJVED vectors (FIG. 51) are plasmids carrying an E. coli truncated phoA gene without initiation codon, signal sequence and regulatory sequence. The multiple cloning site (MCS) allows the insertion of fragments of the genes encoding potential exported proteins as well as their regulatory sequences. Consequently, the fusion protein may be produced and may exhibit an alkaline phosphatase activity if it is exported. Only the fusions in phase may be produced. Thus, the MCS was modified so that the fusions may be obtained in six reading frames. The firefly luciferase luc gene was inserted downstream of phoA. The complete gene with the initiation codon, but without any promoter having been used, thus ought to be expressed with phoA as in a synthetic operon. A new ribosome-binding site was inserted eight nucleotides upstream of the luc initiation codon. Two transcriptional terminators are present in the pJVED vectors, one upstream of the MCS and a second downstream of luc. These vectors are E. coli-mycobacterium transfer plasmids with a kanamycin-resistance gene as selectable marker.

[0459] phoA and luc function as in an operon, but export is necessary for the phoA activity.

[0460] Four plasmids were constructed by insertion into the MCS of DNA fragments of diverse origin:

[0461] In the first construct called pJVED/blaF, the 1.4 kb fragment is derived from the plasmid already described pLA71 (Lim et al., 1995). This fragment, derived from the β-lactamase gene (blaF) of M. fortuitum D216 (Timm et al., 1994), includes the hyperactive mutated promoter, the segment encoding 32 amino acids of the signal sequence and the first 5 amino acids of the mature protein. Thus, this construct includes the strongest promoter known in mycobacterium and the elements necessary for the export of the phoA fusion protein. Consequently, a strong light emission and a good phoA activity can be expected from this construct (cf. FIGS. 53 and 54).

[0462] Into a second construct called pJVED/hsp18, a 1.5 kb fragment was cloned from the plasmid already described pPM1745 (Servant et al., 1995). This fragment includes the nucleotides encoding the first ten amino acids of the 18 kb heat shock protein derived from Streptomyces albus (heat shock protein 18, HSP 18), the ribosome-binding site, the promoter and, upstream, regulatory sites controlling its expression. This protein belongs to the alpha-crystalline family of low-molecular weight HSP (Verbon et al., 1992). Its homolog, derived from M. leprae, the 18 kDa antigen, is already known to be induced during phagocytosis by a murine macrophage of the J-774 cell line (Dellagostinet et al., 1995). Under standard culture conditions, pJVED/hsp18 shows a weak luc activity and no phoA activity (cf. FIGS. 53 and 54).

[0463] In a third construct, called pJVED/P19 kDa, the insert derived from pExp410 (Lim et al., 1995) was cleaved and cloned into the MCS of pJVEDₐ. This fragment includes the nucleotides encoding the first 134 amino acids of the M. tuberculosis 19 kDa known protein and of its regulatory sequences. As has been demonstrated, this protein is a glycosylated lipoprotein (Garbe et al., 1993; Herrmann et al., 1996). In FIGS. 53 and 54, a good luc activity corresponding to a strong promoter is observed for this construct, but the phoA activity is the strongest of the four constructs. The high phoA activity of this fusion protein with a lipoprotein is explained by the fact that it remains attached to the cell wall by its N-terminal end.

[0464] In the fourth and last construct, called pJVED/erp, the insert is derived from pExp53 (Lim et al., 1995) and was cloned into the MCS of pJVEDₐ. pExp53 is the initial plasmid selected for its phoA activity and containing a portion of the M. tuberculosis erp gene which encodes a 28-kDa antigen. The latter includes the signal sequence, a portion of the mature protein and, upstream of the initiation codon, the ribosome-binding site. The promoter was mapped. A putative iron box of the fur type is present in this region and flanks the −35 region of the promoter (Berthet et al., 1995). As expected (FIGS. 53 and 54) this construct exhibits a good light emission and a good phoA activity. The fact that this fusion protein, unlike the fusion with the lipoprotein of 19 kDa, does not appear to be attached to the cell wall does not exclude that the native protein is combined with it. Furthermore, the C-terminal end of erp is absent from the fusion protein.

### Example 2

[0465] Construction of an M. tuberculosis genomic DNA library in the pJVEDₛ vectors and identification of one of the members of these libraries, (DP428), induced during phagocytosis by murine macrophages derived from bone marrow.

[0466] The various constructs were tested for their capacity to evaluate the intracellular expression of the genes identified by the expression of phoA. For this purpose, the luc activity is expressed in RLU for 10³ bacteria in axenic culture and/or under intracellular conditions. The induction or the repression following phagocytosis by the bone marrow-derived murine macrophages can be suitably evaluated by the measurement of specific activities. The results of two separate experiments are presented in Table 2.

[0467] The plasmid pJVED/hsp18 was used as positive control for the induction during the intracellular growth phase. Although the induction of the promoter by heating the bacterium at 42° C. was not conclusive, the phagocytosis of the bacterium clearly leads to an increase in the activity of the promoter. In all the experiments, the intracellular luc activity was strongly induced, increasing by to 100-fold the initially weak basal activity (Servant, 1995).

[0468] The plasmid pJVED/blaF was used as a control for nonspecific modulation during the phagocytosis. It was possible to detect weak variations which were probably due to changes in culture conditions. Whatever the case, these weak variations are not comparable to the induction observed with the plasmid pJVED/hsp18.

[0469] All the members of the DNA library were tested by measuring the activity of the promoter during the intracellular growth. Among these, DP428 is strongly induced during phagocytosis (Tables 1 and 2).

TABLE 1

| | | RLU/10³ | RLU/10³ | |
|---|---|---|---|---|
| | | extracellular | intracellular | |
| Construct | % Recovery | bacteria | bacteria | Induction |
| pJVED/blaF* | 0.5 | 1460 | 1727 | 1.2 |
| pJVED/hsp18 | 0.6 | 8 | 57 | 7.1 |
| pJVED/DP428 | 0.7 | 0.06 | 18 | 300 |

| | | | | RLU/10³ | | | |
|---|---|---|---|---|---|---|---|
| | | | RLU/10³ | intracellular | | | |
| | % Recovery | | extracellular | bacteria | | Induction | |
| Construct | C57BL/6 | Balb/C | bacteria | C57BL/6 | Balb/C | C57BL/6 | Balb/C |
| pJVED/blaF* | 7 | 1.1 | 662 | 250 | 911 | 0.4 | 1.4 |
| pJVED/hsp18 | 6.7 | 1.7 | 164 | 261 | 325 | 1.6 | 2 |
| pJVED/DP428 | 1.6 | 2.1 | 0.08 | 1.25 | 3.3 | 15.6 | 41 |

[0470] TABLE 2

| | | RLU/10³ | RLU/10³ | |
|---|---|---|---|---|
| | | extracellular | intracellular | |
| Construct | % Recovery | bacteria | bacteria | Induction |
| pJVED/blaF* | 22 | 1477 | 367 | 0.25 |
| pJVED/hsp18 | 7 | 0.26 | 6.8 | 26 |
| PJVED/DP428 | 21 | 0.14 | 4 | 28 |

[0471] The nucleotide fragment encoding the N-terminal region of the polypeptide DP428 having the sequence SEQ ID NO: 543 is contained in the plasmid deposited at the CNCM under the No. I-1818.

[0472] The entire sequence encoding the polypeptide DP428 was obtained as detailed below.

[0473] A probe was obtained by PCR with the aid of oligonucleotides having the sequence SEQ ID NO: 528 and SEQ ID NO: 529. This probe was labeled by random extension in the presence of [³²P]dCTP. Hybridization of the genomic DNA of M. tuberculosis strain Mt 103 previously digested with the endonuclease ScaI was carried out with the aid of said probe. The results of the hybridization revealed that a DNA fragment of about 1.7 kb was labeled. Because an Sca1 site exists, extending from the nucleotide nt 984 to the nucleotide nt 989 of the sequence SEQ ID NO: 1, that is to say on the 5′ side of the sequence used as probe, the end of the coding sequence is necessarily present in the fragment detected by hybridization.

[0474] The genomic DNA of the M. tuberculosis Mt 103 strain, after digestion with ScaI, was subjected to migration on agarose gel. The fragments of between 1.6 and 1.8 kb in size were cloned into the vector pSL1180 (Pharmacia) previously cleaved with ScaI and dephosphorylated. After transformation of E. coli with the resulting recombinant vectors, the colonies obtained were screened with the aid of the probe. The screening made it possible to isolate six colonies hybridizing with this probe.

[0475] The inserts contained in the plasmids of the previously selected recombinant clones were sequenced and then the sequences aligned so as to determine the entire sequence encoding DP428, more specifically SEQ ID NO: 35.

[0476] A pair of primers were synthesized in order to amplify, starting with the genomic DNA of M. tuberculosis, strain Mt 103, the entire sequence encoding the polypeptide DP428. The amplicon obtained was cloned into an expression vector.

[0477] Pairs of primers appropriate for the amplification and the cloning of the sequence encoding the polypeptide DP428 can be easily produced by persons skilled in the art, on the basis of the nucleotide sequences SEQ ID NO: 1 and SEQ ID NO: 35.

[0478] A specific pair of primers according to the invention is the following pair of primers, which is capable of amplifying the DNA encoding the polypeptide DP428 lacking its signal sequence:

[0479] forward primer (SEQ ID NO: 917), comprising the sequence going from the nucleotide at position nt 531 to the nucleotide nt 554 of the sequence SEQ ID NO: 35:

5′-AGTGCATGCTGCTGGCCGAACCATCAGCGAC-3′

[0480] backward primer (SEQ ID NO: 918), comprising the sequence complementary to the forward sequence of the nucleotide at position nt 855 to the nucleotide at position nt 835 of the sequence SEQ ID NO: 35:

5′-CAGCCAGATCTGCGGGCGCCCTGCACGGCCTG-3′,

[0481] in which the portion underlined represents the sequences hybridizing specifically with the sequence SEQ ID NO: 35 and the 5′ ends correspond to restriction sites for the cloning of the resulting amplicon into a cloning and/or expression vector.

[0482] A specific vector used for the expression of the polypeptide DP428 is the vector pQE70 marketed by the company Qiagen.

### Example 3

[0483] The complete sequence of the DP428 gene and its flanking regions.

[0484] A probe of the coding region of DP428 was obtained by PCR and used to hybridize the genomic DNA of various mycobacterial species. According to the results of FIG. 3, the gene is present only in mycobacteria of the M. tuberculosis complex.

[0485] Analysis of the sequence suggests that DP428 could be part of an operon. The coding sequence and the flanking regions exhibit no homology with known sequences deposited in databanks.

[0486] Based on the coding sequence, the gene encodes a 10 kDa protein with a signal peptide, a hydrophobic C-terminal end which ends with two arginines and is preceded by an LPISG (SEQ ID NO: 934) motif similar to the known LPXTG (SEQ ID NO: 935) motif. These two arginines could correspond to a retention signal and the protein DP428 could be attached via this motif to peptidoglycans as has already been described in other Gram⁺ bacteria (Navarre et al., 1994 and 1996).

[0487] The mechanism for survival and intracellular growth of mycobacteria is complex and the intimate relationships between the bacteria and the host cell remain unexplained. Whatever the mechanism, the growth and the intracellular survival of mycobacteria depend on factors produced by the bacteria produced by the bacterium and capable of modulating the response of the host. These factors may be molecules which are exposed at the cell surface, such as LAM or cell surface-associated proteins, or actively secreted molecules.

[0488] On the other hand, intracellularly, the bacteria themselves have to confront a hostile environment. They appear to respond to this by means similar to those used under stress conditions, by inducing heat shock proteins (Dellagostin et al., 1995), but also by the induction or the repression of various proteins (Lee et al., 1995). Using a methodology derived from PCR, Plum and Clark-curtiss (Plum et al., 1994) have shown that an M. avium gene included in a 3 kb DNA fragment is induced after phagocytosis by human macrophages. This gene encodes an exported protein comprising a leader sequence but exhibiting no significant homology with the sequences proposed by databanks. The induction, during the intracellular growth phase, of a low-molecular-weight heat shock protein derived from M. leprae has also been demonstrated (Dellagostin et al., 1995). In another study, the bacterial proteins from M. tuberculosis were metabolically labeled during the intracellular growth phase or under stress conditions and separated by two-dimensional gel electrophoresis: 16 M. tuberculosis proteins were induced and 28 were repressed. The same proteins are involved during stress caused by a low pH, a heat shock, H₂O₂, or during phagocytosis by human monocytes of the THP1 line. Whatever the case, the behavior of the induced and repressed proteins was unique under each condition (Lee et al., 1995). Taken together, these results indicate that a subtle molecular dialogue is installed between the bacteria and their host cells. This dialogue probably depends on the fate of the intracellular organism.

[0489] In this context, the induction of the expression of DP428 could be of major importance, indicating an important role for this protein in intracellular survival and growth.

[0490] The method used in these experiments to evaluate the intracellular expression of the genes (cf. Jacobs et al., 1993, for the method for determining the expression of firefly luciferase, and Lim et al., 1995, for the method for determining the expression of the PhoA gene) has the advantage of being simple compared with the other techniques such as the technique described by Mahan et al. (Mahan et al., 1993) adapted to mycobacteria and proposed by Bange et al., (Bange et al., 1996) or the subtractive method based on PCR described by Plum and Clark-Curtiss (Plum et al., 1994). Variability undoubtedly exists as shown by comparing the various experiments. Although causing the induction or the repression is sufficient, it is now possible to evaluate it, thus providing an additional tool for the physiological studies of the exported proteins identified by fusion with phoA.

### Example 4

[0491] Search for modulation of the activity of the promoters during the intramacrophage phases.

[0492] Mouse bone marrow macrophages are prepared as described by Lang and Antoine (Lang et al., 1991). Recombinant M. smegmatis bacteria, whose luciferase activity per 10³ bacteria has been determined as above, are incubated at 37° C. under a humid atmosphere enriched with 5% CO₂, for 4 hours in the presence of these macrophages such that they are phagocytosed. After rinsing in order to remove the remaining extracellular bacteria, amikacin (100 μg/ml) is added to the culture medium for two hours. After another rinsing, the medium is replaced with an antibiotic-free culture medium (DMEM enriched with 10% calf serum and 2 mM glutamine). After overnight incubation as above, the macrophages are lysed at low temperature (4° C.) with the aid of a lysis buffer (cee lysis buffer, Promega), and the luciferase activity per 10³ bacteria is determined. The ratio of the activities at placing in culture and after one night gives the coefficient of induction.

### Example 5

[0493] Isolation of a series of sequences by sequencing directly using colonies.

[0494] A series of sequences allowing the expression and export of phoA were isolated from the DNA of M. tuberculosis or of M. bovis BCG. Among this group of sequences, two of them were further studied, the entire genes corresponding to the inserts were cloned, sequenced and antibodies against the product of these genes served to show by electron microscopy that these genes encoded antigens found at the surface of the tubercle bacilli. One of these genes, erp, encoding a consensus export signal sequence, the other, des, possessed no characteristic of a gene encoding an exported protein, based on the sequence. Another gene, DP428, was sequenced before the sequence of the M. tuberculosis genome became available. It contains a sequence resembling the consensus sequence for attachment to peptidoglycan, which suggests that it is also an antigen which is probably found at the surface of the tubercle bacilli. The study of the three genes, erp, des, and that encoding DP428, shows that the phoA system which we have developed in mycobacteria makes it possible to pick out genes encoding exported proteins with no determinant which can be picked out by studies in silico. This is particularly true for the polypeptides which do not possess a consensus signal sequence (des) or no similarity with proteins having a known function (erp and DP428).

[0495] A number of inserts were identified and sequenced before knowing the genome of M. tuberculosis or of others below. These sequences may be considered as primers which make it possible to search for genes encoding exported proteins. To date, a series of primers have been sequenced and the entire corresponding genes have been either sequenced or identified based on the published sequence of the genome. To take into account sequencing errors which are always possible, the regions upstream or downstream of some primers were considered as being capable of forming part of sequences encoding exported proteins. In some cases, similarities with genes encoding exported proteins or sequences characteristic of export signals or topological characteristics of membrane proteins were detected.

[0496] Primer sequences are found to correspond to genes belonging to families of genes possessing more than 50% similarity. It is thus possible to indicate that the other genes detected by similarity with a primer encode exported proteins. This is the case for the sequence SEQ ID NO: 154 and SEQ ID NO: 156 which possess more than 77% similarity with SEQ ID NOS: 137& 143.

[0497] The sequences which may encode exported proteins are the following: SEQ ID NOS: 1, 8, 14, 25, 31, 33, 137, 139, 141, 143, 145, 148, 150, 152, 154, 156, 158, 160, 162, 225, 228, 238, 246, 250, 255, 258, 260, 41, 46, 52, 165, 169, 177, 407, 410, 412, 419, 421, 426, 429, 431, 433, 437, 441, 447, 452, 456, 459, 461, 110, 113, 119, 353, 357, 359, 489, 495, 497, 501, 505, 510, 516, 519, 522, 651, 653, 657, 660, 662, 759, 761, 764, 767, 769, 811, 813, 817, 821, 823, 887, 895, 901, 907, and 909.

[0498] Genes identified based on the primers from the sequence of the genome have no characteristic (based on the sequence) of the exported proteins. They are the following sequences: SEQ ID NOS: 57-61, 63, 65-66, 68, 70-71, 73, 75, 77, 79-80, 82-83, 85, 87, 531-533, 535-536, 538-542, 185-188, 190-194, 196-199, 201, 203-205, 207-208, 210, 212, 214-216, 218-219, 221-224, 263-267, 269-271, 275-277, 279, 281, 283, 285, 287, 289, 291-296, 298-309, 311-316, 129-132, 134-136, 318-320, 322, 324, 326, 328-330, 332, 334, 336, 338, 340-345, 348-352, 362-363, 365-367, 369, 370, 372-373, 375-379, 381-382, 384, 386, 388, 390-392, 394, 396, 398, 400-402, 404, 406, 464-468, 470-471, 473, 475, 477-481, 483-484, 486, 488, 547-549, 551, 553, 555, 557, 559-563, 565-568, 570, 572, 574-575, 577-579, 581-583, 585, 587, 589, 591-593, 595, 597, 599, 601-603, 605-607, 609, 611, 613, 615, 617, 619, 621, 623, 625, 627-628, 630, 632, 634, 636-639, 641-646, 648, 650, 665, 931-933, 667-668, 670-673, 675, 677, 679-682, 684-685, 687-690, 692, 694, 696, 698-701, 703-716, 718-727, 729-732, 734-735, 737, 738, 740, 742, 744-745, 747-751, 753-754, 756, 758, 772-780, 781-783, 785-793, 795-804, 806, 808, 810, 826, 828-830, 832, 834, 836, 838, 840-841, 843, 845, 847, 849-863, 865-877, 879-882, 884, and 886.

[0499] Based on the sequence of other organisms such as E. coli, it is possible to search in the sequence of the M. tuberculosis genome for genes possessing similarities with proteins known to be exported in other organisms although not possessing an export signal sequence. In this case, fusion with phoA is an advantageous protocol for determining if these M. tuberculosis sequences encode exported proteins although possessing no consensus signal sequence. It has indeed been possible to clone SEQ ID NOS: 848, 864, 878, 883, and 885, sequences similar to an E. coli gene of the htrA family. A fusion of SEQ ID NOS: 848, 864, 878, 883, and 885 with phoA leads to the expression and the export of phoA. M. smegmatis colonies harboring SEQ ID NOS: 848, 864, 878, 883, and 885 phoA fusion on a plasmid pJVED are blue.

[0500] SEQ ID NOS: 849-863, 865-877, 879, 880-882, 884, and 886 are therefore considered exported proteins.

[0501] The phoA method is therefore useful for detecting, based on the M. tuberculosis sequence, genes encoding exported proteins without them encoding sequences which are characteristic of the exported proteins.

[0502] Even if a sequence possesses determinants of exported proteins, this does not demonstrate a functional export. The phoA system makes it possible to show that the gene suspected really encodes an exported protein. Thus, it was checked that the sequences SEQ ID NOS: 887, 895, 901, 907, and 909 indeed possessed export signals.

TABLE 3

| | Reference of the | | |
|---|---|---|---|
| | corresponding sequence | | |
| SEQ ID No. | predicted by Cole et at. | | Annotation |
| SEQ ID NOS: 2-7, | Rv 0203 | * | Sequence hydrophobic at |
| 9-13, 15-24, 26-30, | | | the N-terminus |
| 32, 34 | | | |
| SEQ ID NOS: 57-61, | Rv 2050 | | No prediction |
| 63, 65-66, 68, | | | |
| 70-71, 73, 75, 77, | | | |
| 79-80, 82-83, 85, | | | |
| 87, 531-533, 535-536, | | | |
| 538-542 | | | |
| SEQ ID NOS: | Rv 2563 | * | Membrane protein |
| 138, 272-273, | | | |
| 140, 142, 144, | | | |
| 146-147, 149, | | | |
| 151, 153, 155, | | | |
| 157, 159, 161, | | | |
| 163-164 | | | |
| SEQ ID NOS: | Rv 0072 | * | Possible transmembrane |
| 155, 157 | | | transport protein of the |
| | | | ABC type |
| SEQ ID NOS: | Rv 0546c | ML | Protein S-D Lactoyl |
| 185-188, 190-194, | | | Glutathione-methyl |
| 196-199, | | | glyoxal lyase |
| 201, 203-205, | | | |
| 207-208, 210, | | | |
| 212 | | | |
| SEQ ID NOS: | no prediction | | not found in |
| 214-216, 218, | | | M. tuberculosis H37rv |
| 219, 221-224 | | | |
| SEQ ID NOS: | Rv 1984c | * | probable precursor |
| 226-227, 923-925, | | | cutinase with an N- |
| 229-237, | | | terminal signal sequence |
| 239-245, 247-249, | | | |
| 251-254, | | | |
| 256-257, 259, | | | |
| 261, 42-45, 47-51, | | | |
| 53-55, 166-168, | | | |
| 170-176, | | | |
| 178-183 | | | |
| SEQ ID NOS: | no prediction | | no prediction |
| 263-267, 269-271, | | | |
| 275-277, | | | |
| 279, 281, 283, | | | |
| 285, 287, 289, | | | |
| 291-296, 298-309, | | | |
| 311-316, | | | |
| 123-127, 129-132, | | | |
| 134-136 | | | |
| SEQ ID NOS: | with reading frame shift, | | no prediction |
| 318-320, 322, | could be in phase with | | |
| 324, 326, 328-330, | Rv 2530c | | |
| 332, 334, | | | |
| 336, 338, 340-345, | | | |
| 348-352 | | | |
| SEQ ID NOS: | Rv 1303 | ML | no prediction |
| 362-363, 365-367, | | | |
| 369-370, | | | |
| 372-373, 375-379, | | | |
| 381-382, | | | |
| 384, 386 | | | |
| SEQ ID NOS: | Rv 0199 | ML | no prediction |
| 388, 390-392, | | | |
| 394, 396, 398, | | | |
| 400-402, 404, | | | |
| 406 | | | |
| SEQ ID NOS: | Rv 0418 | * | site for attachment of |
| 408-409, 411, | | | prokaryotic membrane |
| 413-418, 420, | | | lipoprotein, similarity with |
| 422-425, 427-428, | | | N-acetyl puromycin acetyl |
| 430, 432 | | | hydrolase |
| SEQ ID NOS: | Rv 3576 | * | contains a site for |
| 434-436, 438-440, | | | attachment of prokaryotic |
| 442-446, | | | membrane lipoprotein, |
| 448-451, 453-455, | | | similarity with a |
| 457-458, | | | serine/threonine protein |
| 460, 462, 111-112, | | | kinase |
| 114-118, | | | |
| 120-121 | | | |
| SEQ ID NOS: | Rv 3365c | ML | similarity with a zinc |
| 464-468, 470-471, | | | metallopeptidase |
| 473, 475, | | | |
| 477-481, 483-484, | | | |
| 486, 488 | | | |
| SEQ ID NOS: | not predicted | | no prediction |
| 547-549, 551, | | | |
| 553, 555 | | | |
| SEQ ID NOS: | Rv 0822c | ML | Existence of a consensus |
| 557, 559-563, | | | region with the drac family |
| 565-568, 570, | | | |
| 572 | | | |
| SEQ ID NOS: | Rv 1044 | | no prediction |
| 574-575, 577-579, | | | |
| 581-583, | | | |
| 585, 587 | | | |
| SEQ ID NOS: | not predicted | | no prediction |
| 589, 591-593, | | | |
| 595, 597 | | | |
| SEQ ID NOS: | Rv 2169c | | no prediction |
| 599, 601-603, | | | |
| 605-607, 609, | | | |
| 611 | | | |
| SEQ ID NOS: | Rv 3909 | ML | no prediction |
| 613, 615, 617, | | | |
| 619, 621 | | | |
| SEQ ID NOS: | Rv 2753c | | similarity with |
| 623, 625, 627-628, | | | dihydropricolinate |
| 630, 632 | | | synthases |
| SEQ ID NOS: | Rv 0175 | | no prediction |
| 634, 636-639, | | | |
| 641-646, 648, | | | |
| 650, | | | |
| SEQ ID NOS: | Rv 3006 | * | prediction of lipoprotein |
| 652, 654-656, | | ML | signal sequence |
| 658-659, 661, | | | |
| 663 | | | |
| SEQ ID NOS: | Rv 0549c | | no prediction |
| 665, 931-933, | | | |
| 667-668, 670-673, | | | |
| 675, 677 | | | |
| SEQ ID NOS: | Rv 2975c being capable of | | similarity with substilis |
| 679-682, 684-685, | being in phase with | | protein |
| 687-690, | Rv 2974c | | |
| 692, 694, 696, | | | |
| 698-701, 703-716, | | | |
| 718-727 | | | |
| SEQ ID NOS: | Rv 2622 | | similarity with a methyl |
| 729-732, 734-735, | | | transferase |
| 737-738, | | | |
| 740, 742 | | | |
| SEQ ID NOS: | Rv 3278c | ML | no prediction |
| 744-745, 747-751, | | | |
| 753-754, | | | |
| 756, 758 | | | |
| SEQ ID NOS: | Rv 0309 | * | no prediction |
| 760, 762-763, | | | |
| 765-766, 768, | | | |
| 770 | | | |
| SEQ ID NOS: | Rv 2169c | ML | no prediction |
| 772-783, 785-793, | | | |
| 795-804, | | | |
| 806, 808, 810 | | | |
| SEQ ID NOS: | Rv 1411c | * | probable lipoprotein with |
| 812, 814-816, | | | an N-terminal signal |
| 818-820, 822, | | | sequence |
| 824 | | | |
| SEQ ID NOS: | Rv 1714 | | similarity with a gluconate |
| 826, 828-830, | | | 3-dehydrogenase |
| 832, 834, 836 | | | |
| SEQ ID NOS: | Rv 0331 | | similarity with a sulfide |
| 838, 840-841, | | | dehydrogenase and a |
| 843, 845, 847, | | | sulfide quinone reductase |
| SEQ ID NOS: | Rv 0983 | ML | similarity with a serine |
| 849-863, 865-877, | | | protease HtrA |
| 877, 879-882, | | | |
| 884, 886 | | | |
| SEQ ID NOS: 89, | | | |
| 91, 93-95, 97, 99, | | | |
| 101-103, 105, | | | |
| 107, 109 | | | |
| SEQ ID NOS: | Rv 3810 | * | Surface protein (Berthelet |
| 354-356, 358, | | ML | et al., 1995) |
| 360, 926-930 | | | |
| SEQ ID NOS: | Rv 3763 | * | Contains a site for |
| 490-494, 496, | | | attachment of eukaryotic |
| 498-500, 502-504, | | | membrane lipoprotein |
| 506-509, | | | |
| 511-515, 517-518, | | | |
| 520-521, | | | |
| 523-527 | | | |
| SEQ ID NOS: | Rv 0125 | * | Active site of serine |
| 888-894, 896-900, | | | proteases |
| 902-906, | | | Possible N-terminal signal |
| 908, 910 | | | sequence |

Legend to Table 3:
Correspondence between the sequences according to the invention and the sequences predicted by Cole et al., 1998, Nature, 393, 537-544.
*: Prediction that the protein encoded by the sequence is exported.
ML: Prediction of similarity with M. leprae.

### Example 6

[0503] Characteristics and production of the protein M1C25.

[0504] The N-terminal end of the protein M1C25 was detected by the PhoA system as allowing the export of the fusion protein, necessary for the production of its phosphatase activity.

[0505] The DNA sequence encoding the N-terminal end of the protein M1C25 is contained in the sequences SEQ ID NOS: 433, 437, 441, 447, 452, 456, 459, 461 of the present patent application.

[0506] From this primer sequence, the complete gene encoding the protein M1C25 was sought in the M. tuberculosis genome (Wellcome Trust Foundation, Sanger site).

[0507] The Sanger center attributed to M1C25 the names:

[0508] Rv 3576,

[0509] MTCY06G11.23,

[0510] pknM

Sequence SEQ ID NO: 544 of the Complete M1C25 Gene (714 Bases): cf. FIG. 29

[0511] This gene encodes a protein of 237 AA, having a molecular mass of 25 kDa. This protein is listed in the libraries under the names:

[0512] PID:e306716,

[0513] SPTREMBL:P96858

Sequence SEQ ID NO: 545 of the Protein M1C25 (235 Amino Acids): cf. FIG. 30

[0514] M1C25 contains a site for attachment to the lipid portion of the prokaryotic membrane lipoproteins (PS00013 Prokaryotic membrane lipoprotein lipid attachment site:

(SEQ ID NO: 919)

CTGGTCGGTG CGTGCATGCT CGGAGCCGGA TGC).

[0515] The function of M1C25 is not clear but it most probably possesses a “serine/threonine protein kinase” activity. Similarities should be noted with the C-terminal moiety of K08G_MYCTU Q11053 Rv1266c (MTCY50.16). Similarities are also found with KY28_MYCTU.

[0516] A gene potentially encoding a regulatory protein (PID:e306715, SPTREMBL:P96857, Rv3575c, (MTCY06G11.22c)) is found in 5′ of the gene encoding M1C25.

[0517] The hydrophobicity profile (Kyte and Doolitle) of M1C25 is represented in FIG. 56.

[0518] A site of cleavage of the signal sequence is predicted (SignalP V1.1; World Wide Web Prediction Server, Center for Biological Sequence Analysis) between amino acids 31 and 32: AVA-AD. This cleavage site is behind a conventional “AXA” motif. This prediction is compatible with the hydrophobicity profile. In this potential signal sequence, it is observed that the sequence of the three amino acids LAA is repeated three times.

[0519] Cloning of the M1C25 gene for the production of the protein which it encodes:

[0520] A pair of primers were synthesized in order to amplify, using the genomic DNA of M. tuberculosis, strain H37Rv, the entire sequence encoding the polypeptide M1C25. The amplicon obtained was cloned into an expression vector.

[0521] Pairs of primers appropriate for the amplification and the cloning of the sequence encoding M1C25 were synthesized:

forward primer:

(SEQ ID NO: 920)

5′-ATAATACCATGGGCAAGCAGCTAGCCGCGC-3′
backward primer:

(SEQ ID NO: 921)

5′-ATTTATAGATCTCTGCTTAGCAACCTTGGCCGCG-3′

[0522] The underlined portion represents the sequences specifically hybridizing with the M1C25 sequence and the 5′ ends correspond to restriction sites for the cloning of the resulting amplicon into a cloning and/or expression vector.

[0523] A specific vector used for the expression of the polypeptide M1C25 is the vector pQE60 marketed by the company Qiagen, following the protocol and the recommendations proposed by this brand.

[0524] The cells used for the cloning are bacteria: E. coli XL1-Blue (resistant to tetracycline).

[0525] The cells used for the expression are bacteria: E. coli M15 (resistant to kanamycin) containing the plasmid pRep4 (M15 pRep4).

[0526] The production of the protein MYC25 is illustrated by FIGS. 57A and B (bacterial extracts from the E. coli M15 strain containing the plasmid pM1C25). The bacterial cultures and the extracts are prepared according to Sambrook et al. (1989). Analysis of the bacterial extracts is carried out according to the Quiagen instructions (1997).

### BIBLIOGRAPHIC REFERENCES

[0527] AIDS therapies, 1993, in Mycobacterial infections, ISBN 0-9631698-1-5, pp. 1-11.
[0528] Altschul, S. F. et al., 1990, J. Mol. Biol., 215: 403-410.
[0529] Andersen, P. et al., 1991, Infect. Immun., 59: 1905-1910.
[0530] Andersen, P. et al., 1995, J. Immunol., 154: 3359-3372.
[0531] Bange, F. C. et al., A. M. Brown, and W. R. Jacobs J R., 1996, Leucine auxotrophy restricts growth of Mycobacterium bovis BCG in macrophages. Infect. Immun., 64:1794-1799.
[0532] Barany, F., 1911, Proc. Natl. Acad. Sci. USA, 88: 189-193.
[0533] Bates, J. 1979, Chest. 76(Suppl.):757-763.
[0534] Bates, J. et al., 1986. Am. Rev. Respir. Dis. 134: 415-417.
[0535] Berthet, F. X., J. Rauzier, E. M. Lim, W. Philipp, B. Gicquel, and D. Portnoï, 1995, Characterization of the M. tuberculosis erp gene encoding a potential cell surface protein with repetitive structures. Microbiology. In press.
[0536] Borremans, M. et al., 1989, Biochemistry, 7: 3123-3130.
[0537] Bouvet, E. 1994, Rev. Fr. Lab. 273: 53-56.
[0538] Brockman, R. W. and Heppel L. A., 1968, On the localization of alkaline phosphatase and cyclic phosphodiesterase in Escherichia coli, Biochemistry, 7: 2554-2561.
[0539] Burg, J. L. et al., 1996, Mol. and Cell. Probes, 10: 257-271.
[0540] Chevrier, D. et al., 1993, Mol. and Cell. Probes, 7: 187-197.
[0541] Chu, B. C. F. et al., 1986, Nucleic Acids Res., 14: 5591-5603.
[0542] Clemens, D. L., 1996, Characterization of the Mycobacterium tuberculosis phagosome, Trends Microbiol., 4: 113-118.
[0543] Clemens, D. L. and Horwitz M. A., 1995, Characterization of the Mycobacterium tuberculosis phagosome and evidence that phagosomal maturation is inhibited, J. Exp. Med., 181: 257-270.
[0544] Colignon J. E., 1996, Immumologic studies in humans. Measurement of proliferative responses of culturered lymphocytes. Current Protocols in Immunology, NIH, 2, Section II.
[0545] Daniel, T. M. et al. 1987, Am. Rev. Respir. Dis., 135:1137-1151).
[0546] Dellagostin, O. A., Esposito G., Eales L.-J., Dale J. W. and McFadden J. J., 1995, Activity of mycobacterial promoters during intracellular and extracellular growth. Microbiol., 141: 2123-2130.
[0547] Drake, T. A. et al. 1987. J. Clin. Microbiol. 25: 1442-1445.
[0548] Dramsi et al., 1997, Infection and Immunity, 65, 5: 1615-1625.
[0549] Duck, P. et al., 1990, Biotechniques, 9: 142-147.
[0550] Erlich, H. A. 1989. In PCR Technology. Principles and Applications for DNA Amplification. New York: Stockton Press.
[0551] Felgner et al., 1987, Proc. Natl. Acad. Sci., 84: 7413.
[0552] Fraley et al., 1980, J. Biol. Chem., 255: 10431.
[0553] Gaillard, J. L., Berche P., Frehel C., Gouin E. and Cossart P., 1991, Entry of L. monocytogenes into cells is mediated by internalin, a repeat protein reminiscent of surface antigens from Gram-positive cocci, Cell., 65: 1127-1141.
[0554] Garbe, T., Harris D., Vordermeir M., Lathigra R., Ivanyi J. and Young D., 1993, Expression of the Mycobacterium tuberculosis 19-kilodalton antigen in Mycobacterium smegmastis: immunological analysis and evidence of glycosylation. Infect. Immun., 61: 260-267.
[0555] Guateli, J. C. et al., 1990, Proc. Natl. Acad. Sci. USA, 87: 1874-1878.
[0556] Harboe et al., 1996, Infect. Immun., 64: 16-22.
[0557] Herrmann, J. L., O'Gaora P., Gallagher A., Thole J. E. R. and Young D. B., 1996, Bacterial glycoproteins: a link between glycosylation and proteolytic cleavage of a 19 kDa antigen from Mycobacterium tuberculosis, EMBO J. 15: 3547-3554.
[0558] Houbenweyl, 1974, in Meuthode der Organischen Chemie, E. Wunsch Ed., Volume 15-I et 15-II, Thieme, Stuttgart.
[0559] Huygen, K. et al., 1996, Nature Medicine, 2(8): 893-898.
[0560] Innis, M. A. et al., 1990. in PCR Protocols. A Guide to Methods and Applications. San Diego: Academic Press.
[0561] Isberg, R. R., Voorhis D. L. and Falkow S., 1987, Identification of invasin: a protein that allows enteric bacteria to penetrate cultured mammalian cells, Cell, 50: 769-778.
[0562] Jacobs, W. R. et al., 1991. Construction of mycobacterial genomic libraries in shuttle cosmids. Genetic Systems for Mycobacteria, Methods in Enzymology, 204: 537-555.
[0563] Jacobs, W. R. et al., 1993, Science, 260: 819-822.
[0564] Kaneda, et al., 1989, Science, 243:375.
[0565] Kiehn, T. E., et al. 1987. J. Clin. Microbiol. 25: 1551-1552.
[0566] Kievitis, T. et al., 1991, J. Virol. Methods, 35: 273-286.
[0567] Kohler, G. et al., 1975, Nature, 256(5517):495-497.
[0568] Kwoh, D. Y. et al., 1989, Proc. Natl. Acad. Sci. USA, 86:1173-1177.
[0569] Landegren, U. et al., 1988, Science, 241: 1077-1080.
[0570] Lang, T. and Antoine J.-C., 1991, Localization of MHC class II molecules in murine bone marrow-derived macrophages. Immunology, 72: 199-205.
[0571] Lee, B. Y and Horwitz M. A., 1995, Identification of macrophage and stress-induced proteins of Mycobacterium tuberculosis, J. Clin. Invest., 96: 245-249.
[0572] Lim, E. M., Rauzier J., Timm J., Torrea G., Murray A., Gicquel B. and Portnoï D., 1995, Identification of Mycobacterium tuberculosis DNA sequences encoding exported proteins, using phoA gene fusions, J. Bacteriol., 177: 59-65.
[0573] Lizardi, P. M. et al., 1988, Bio/technology, 6: 1197-1202.
[0574] Mahan, M. J. et al., 1993. Selection of bacterial virulence genes that are specifically induced in host tissues, Science, 259: 686-688.
[0575] Manoil L., Mekolanos J. J. and Beckwith J., J. Bacteriol., 1990, 172: 515-518.
[0576] Matthew, J. A. et al., 1988, Anal. Biochem., 169:1-25.
[0577] Merrifield, R. D., 1966, J. Am. Chem. Soc., 88(21): 5051-5052.
[0578] Midoux, P. et al., 1993, Nucleic Acids Research, 21: 871-878.
[0579] Miele, E. A. et al., 1983, J. Mol. Biol., 171: 281-295.
[0580] Minton, N. P., 1984, Gene, 31: 269-273.
[0581] Montgomery et al., 1993, DNA Cell Biol., 12: 777-783.
[0582] Navarre, W. W. et al., 1994, Molecular Microbiologie, 14(1): 115-121.
[0583] Navarre, W. W. et al., 1996, J. of Bacteriology, 178, 2: 441-446.
[0584] Pagano et al., 1967, J. Virol., 1: 891.
[0585] Pastore, 1994, Circulation, 90:1-517.
[0586] Patel, et al. 1990, J. Clin. Microbiol. 28: 513-518.
[0587] Prentki, B. and Krish H. M., 1984, Gene 29: 303-313.
[0588] Pettersson R., Nordfelth J., Dubinina E., Bergman T., Gustafsson M., Magnusson K. E. and Wolf-Watz H., 1996, Modulation of virulence factor expression by pathogen target cell contact. Science, 273: 1231-1233.
[0589] Plum, G. and Clark-Curtiss J. E., 1994, Induction of Mycobacterium avium gene expression following phagocytosis by human macrophages. Infect. Immun., 62: 476-483.
[0590] Roberts, M. C., et al., 1987, J. Clin. Microbiol. 25: 1239-1243.
[0591] Rolfs, A. et al., 1991, In PCR Topics. Usage of Polymerase Chain Reaction in Genetic and Infectious Disease. Berlin: Springer-Verlag.
[0592] Sambrook, J. et al. 1989, In Molecular Cloning: A Laboratory Manual. Cold Spring Harbor, N.Y.: Cold Spring Harbor Laboratory Press.
[0593] Sanchez-Pescador, R., 1988, J. Clin. Microbiol., 26(10): 1934-1938.
[0594] Schneewind, O. et al., 1995, Science, 268: 103-106.
[0595] Segev D., 1992, in Non-radioactive Labeling and Detection of Biomolecules. Kessler C. Springer Verlag, Berlin, New-York, 197-205.
[0596] Servant, P. and Mazodier P., 1995, Characterization of Streptomyces albus 18-kilodalton heat shock-responsive protein. J. Bacteriol., 177: 2998-3003.
[0597] Shiver, J. W., 1995, in Vaccines 1995, eds Chanock, R. M. Brown, F. Ginsberg, H. S. & Norrby, E.), pp. 95-98, Cold Spring Harbor Laboratory Press, Cold Spring Harbor, N.Y.
[0598] Sorensen et al., 1995, Infect. Immun., 63: 1710-1717.
[0599] Stone, B. B. et al., 1996, Mol. and Cell. Probes, 10: 359-370.
[0600] Stover, C. K., Bansal G. P., Hanson M. S., Burlein S. R., Palaszynski S. R., Young J. F., Koenig S., Young D. B., Sadziene A. and Barbour A. G., 1993, Protective immunity elecited by recombinant Bacille Calmette-Guérin (BCG) expressing outer surface protien A (OspA) lipoprotein: a candidate Lyme disease vaccine. J. Exp. Med., 178:197-209.
[0601] Sturgill-Koszycki, S., Schlesinger P. H., Chakroborty P., Haddix P. L., Collins H. L., Fok A. K., Allen R. D., Gluck S. L., Heuser J. and Russell D. G., 1994, Lack of acidification of Mycobacterium phagosomes by exclusion of the vesicular proton-ATPase. Science, 263: 678-681.
[0602] Tascon, R. E. et al., 1996, Nature Medicine, 2(8): 888-892.
[0603] Technique for assembling oligonucleotides, 1983, Proc. Natl. Acad. Sci. USA, 80: 7461-7465.
[0604] Technique for beta-cyanethylphosphoramidites, 1986, Bioorganic Chem., 4: 274-325.
[0605] Thierry, D. et al., 1990, Nucl. Acid Res., 18: 188.
[0606] Timm, J., Perilli M. G., Duez C., Trias J., Orefici G., Fattorini L., Amicosante G., Oratore A., Boris B., Frere J. M., Pugsley A. P. and Gicquel B., 1994, Transcription and expression analysis, using lacZ and phoA gene fusions, of Mycobacterium fortuitum B-lactamase genes cloned from a natural isolate and a high-level B-lactamase producer. Mol. Microbiol., 12: 491-504.
[0607] Tuberculosis Prevention Trial, 1980, Mendis, Trial of BCG vaccines in South India for Tuberculosis Infection, Indian J. of Med. Res., 1972 (Suppl.): 1-74.
[0608] Urdea, M. S. et al., 1991, Nucleic Acids Symp. Ser., 24:197-200.
[0609] Urdea, M. S., 1988, Nucleic Acids Research, 11: 4937-4957.
[0610] Verbon, A., Hartskeerl R. A., Schuitema A., Kolk A. H., Young D. B. and Lathigra R., 1992, The 14,000-molecular-weight antigen of Mycobacterium tuberculosis is related to the alpha-crystallin family of low-molecular-weight heat shock proteins. J Bacteriol., 174: 1352-1359.
[0611] Walker, G. T. et al., 1992, Nucleic Acids Res., 20:1691-1696.
[0612] Walker, G. T. et al., 1992, Proc. Natl. Acad. Sci. USA, 89: 392-396.
[0613] Wiker, H. G. et al., 1992, Microbiol. Rev., 56: 648-661.
[0614] Yamaguchi, R. et al., 1989, Infect. Immun., 57: 283-288.
[0615] Xu, S., Cooper, A., Sturgill-Koszycki, S., van Heyningen, T., Chatterjee, D., Orme, I., Allen, P. and Russel, D. G., 1994, Intracellular trafficking in Mycobacterium tuberculosis and Mycobacterium avium-infected macrophages, J. Immunol., 153: 2568-2578.
[0616] Young, D. B. et al., 1992, Mol. Microbiol., 6:133-145.
[0617] Yuen, L. K. W. et al., 1993, J. Clin. Microbiol., 31: 1615-1618.

1-74. (canceled)

75. A purified polynucleotide, comprising a nucleotide sequence chosen from:
a) SEQ ID NOS: 1, 8, 14, 25, 31, 33 and 35;
b) nucleotide 964 to nucleotide 1234, inclusive, of SEQ ID NO: 1;
c) a sequence complementary to a nucleotide sequence defined in a) or b);
d) a sequence that exhibits at least 50% identity with a nucleotide sequence defined in a), b) or c); and
e) a fragment of at least 12 consecutive nucleotides of a nucleotide sequence defined in a), b), or c.

76. A purified polynucleotide consisting of a nucleotide sequence chosen from SEQ ID NOS: 1, 8, 14, 25, 31, 33 and 35.

77. A purified polypeptide encoded by a polynucleotide sequence according to claim 75.

78. A purified polypeptide, comprising an amino acid sequence chosen from:
a) SEQ ID NO: 2 to 7, 10 to 13, 15 to 24, 26 to 30, 32, 34, 36 to 40 and 543,
b) a biologically active polypeptide fragment of a polypeptide defined in a) having at least 5 amino acids and capable of being exported and/or secreted by a mycobacterium, and/or of being induced or repressed during infection with the mycobacterium; and/or
capable of inducing, repressing or modulating, directly or indirectly, a mycobacterium virulence factor; and/or
capable of inducing an immunogenicity reaction directed against mycobacteria; and/or
capable of being recognized by an antibody which is specific for mycobacterium.

79. A purified polynucleotide, comprising a nucleotide sequence that encodes a polypeptide according to claim 78.

80. A purified polynucleotide primer, comprising a polynucleotide sequence of at least 12 consecutive nucleotides of a polynucleotide according to claim 75.

81. The purified polynucleotide primer according to claim 80, wherein the polynucleotide sequence is chosen from SEQ ID NO: 528 and SEQ ID NO: 529.

82. A polynucleotide comprising a nucleotide sequence according to claim 75, wherein the polynucleotide is labeled with a radioactive compound or with a nonradioactive compound.

83. A polynucleotide comprising a nucleotide sequence according to claim 75, wherein the polynucleotide is covalently or noncovalently immobilized on a support.

84. The polynucleotide according to claim 83, wherein the nucleotide sequence is nucleotide 964 to nucleotide 1234, inclusive, of SEQ ID NO: 1.

85. A recombinant cloning, expression and/or insertion vector, comprising a nucleotide sequence according to claim 75.

86. A host cell transformed with the recombinant vector according to claim 85.

87. The host cell according to claim 86, wherein the cell is the E. coli strain transformed with the plasmid pDP428 deposited on 28 Jan. 1997 at the CNCN under the No. I-1818, or the cell is of a strain of M. tuberculosis, M. bovis or M. africanum.

88. The host cell according to claim 87, wherein the cell is of a strain of M. smegmatis, M. bovis, M. bovis BCG, or M. africanum.

The application's sequence listing, which the Patent Office published only in electronic form, follows.

SEQUENCE LISTING (935 sequences)

SEQ ID NO: 1 - DNA, 1243 bp, Mycobacterium tuberculosis
  CDS (21)..(38)
  CDS (124)..(453)
  CDS (473)..(481)
  CDS (573)..(671)
  CDS (719)..(928)
  CDS (942)..(1241)
ggatcccagggaacgtgaccatggtcgtagggatgacttgacagtttcaacggggtgcgaccaccgttgcgctcagaaggcatacgttggtggaacacgtcggaaagctgggaggtgaatctgatggctggcgaccaagagctggaactgcggttcgacgttcctctttacacgcttgccgaggcatcgcggtacctggtggttccccgcgccaccctggctacgtgggctgacggctacgagcgtcggccggccaacgcaccggcggtccaggggcaaccgatcgcctttgacgcctattcggtcgcgcagctttttggcgacgtcactggtgcccgcgttgcgggcgtccagccgcagcgacaccacatacggccggtccggttgcgggggccgttgggtggggttgggtgcctccgtcaccccaggcagttcgctggctatttgtcgcagtagcgcgacggcattgtcgatgtcttggtagctagcatccggtcggggggccgctaccagcgccagcgccggggctccccggtccgggtagtgcgcgtcgagttggtcgtggaccagcaatgactgcgacccggcgacttcgaaaccgccaccggttagattccccgactgcgtcatcgccaggtaaaccgccggcactaacgccagcaaccaacccgtgaagaccaaccaacggcacctgcgcaggttgcggctcaaccgcatcatgaactgctggatttcggactccccgtactctcgcgcagtgcgtgcccgcgagcctaccgaagatcgcgtgcatgcgttcggcgtggaccgcacagcacctggagttggcggcgccgagggccgagatggcaggatgacggatcgtcgggggcgggaactcccaggccgccggaccgtcgcaaacccgtcgcaaacccgtcgcaaaccgtaaggagtcatccatgaagacaggcaccgcgacgacgcggcgcaggctgttggcagtactgatcgccctcgcgttgccgggggccgccgttgcgctgctggccgaaccatcagcgaccggcgcgtcggacccgtgcgcggccagcgaagtggcgaggacggtcggttcggtcgccaagtcgatgggcgactacctggattcacacccagagaccaaccaggtgatgaccgcggtcttgcagcagcaggtagggccggggtcggtcgcatcgctgaaggcccatttcgaggcgaatcccaaggtcgcatcggatcc

SEQ ID NO: 2 - protein, 322 aa, Mycobacterium tuberculosis
MVVGMTMAGDQELELRFDVPLYTLAEASRYLVVPRATLATWADGYERRPANAPAVQGQPIAFDAYSVAQLFGDVTGARVAGVQPQRHHIRPVRLRGPLGGVGCLRHPRQFAGYLSQMSWMTATRRLRNRHRLDSPTASSPGKPPALTPATNPMNCWISDSPYSRAVRAREPTEDRVHAFGVDRTAPGVGGAEGRDGRMTDRRGRELPGRRTVANPSQTRRKPMKTGTATTRRRLLAVLIALALPGAAVALLAEPSATGASDPCAASEVARTVGSVAKSMGDYLDSHPETNQVMTAVLQQQVGPGSVASLKAHFEANPKVASD

SEQ ID NO: 3 - protein, 6 aa, Mycobacterium tuberculosis
MVVGMT

SEQ ID NO: 4 - protein, 110 aa, Mycobacterium tuberculosis
MAGDQELELRFDVPLYTLAEASRYLVVPRATLATWADGYERRPANAPAVQGQPIAFDAYSVAQLFGDVTGARVAGVQPQRHHIRPVRLRGPLGGVGCLRHPRQFAGYLSQ

SEQ ID NO: 5 - protein, 33 aa, Mycobacterium tuberculosis
MTATRRLRNRHRLDSPTASSPGKPPALTPATNP

SEQ ID NO: 6 - protein, 70 aa, Mycobacterium tuberculosis
MNCWISDSPYSRAVRAREPTEDRVHAFGVDRTAPGVGGAEGRDGRMTDRRGRELPGRRTVANPSQTRRKP

SEQ ID NO: 7 - protein, 100 aa, Mycobacterium tuberculosis
MKTGTATTRRRLLAVLIALALPGAAVALLAEPSATGASDPCAASEVARTVGSVAKSMGDYLDSHPETNQVMTAVLQQQVGPGSVASLKAHFEANPKVASD

SEQ ID NO: 8 - DNA, 961 bp, Mycobacterium tuberculosis
  CDS (1)..(9)
  CDS (13)..(204)
  CDS (208)..(390)
  CDS (394)..(438)
  CDS (442)..(573)
  CDS (577)..(960)
gatcgcctttgacgcctattcggtcgcgcagctttttggcgacgtcactggtgcccgcgttgcgggcgtccagccgcagcgacaccacatacggccggtccggttgcgggggccgttgggtggggttgggtgcctccgtcaccccaggcagttcgctggctatttgtcgcagtagcgcgacggcattgtcgatgtcttggtagctagcatccggtcggggggccgctaccagcgccagcgccggggctccccggtccgggtagtgcgcgtcgagttggtcgtggaccagcaatgactgcgacccggcgacttcgaaaccgccaccggttagattccccgactgcgtcatcgccaggtaaaccgccggcactaacgccagcaaccaacccgtgaagaccaaccaacggcacctgcgcaggttgcggctcaaccgcatcatgaactgctggatttcggactccccgtactctcgcgcagtgcgtgcccgcgagcctaccgaagatcgcgtgcatgcgttcggcgtggaccgcacagcacctggagttggcggcgccgagggccgagatggcaggatgacggatcgtcgggggcgggaactcccaggccgccggaccgtcgcaaacccgtcgcaaacccgtcgcaaaccgtaaggagtcatccatgaagacaggcaccgcgacgacgcggcgcaggctgttggcagtactgatcgccctcgcgttgccgggggccgccgttgcgctgctggccgaaccatcagcgaccggcgcgtcggacccgtgcgcggccagcgaagtggcgaggacggtcggttcggtcgccaagtcgatgggcgactacctggattcacacccagagaccaaccaggtgatgaccgcggtcttgcagcagcaggtagggccggggtcggtcgcatcgctgaaggcccatttcgaggcgaatcccaaggtcgcatcggatc

SEQ ID NO: 9 - protein, 64 aa, Mycobacterium tuberculosis
RLFGRAAFWRRHWCPRCGRPAAATPHTAGPVAGAVGWGWVPPSPQAVRWLFVAVARRHCRCLGS

SEQ ID NO: 10 - protein, 61 aa, Mycobacterium tuberculosis
HPVGGPLPAPAPGLPGPGSARRVGRGPAMTATRRLRNRHRLDSPTASSPGKPPALTPATNP

SEQ ID NO: 11 - protein, 15 aa, Mycobacterium tuberculosis
RPTNGTCAGCGSTAS

SEQ ID NO: 12 - protein, 44 aa, Mycobacterium tuberculosis
TAGFRTPRTLAQCVPASLPKIACMRSAWTAQHLELAAPRAEMAG

SEQ ID NO: 13 - protein, 128 aa, Mycobacterium tuberculosis
RIVGGGNSQAAGPSQTRRKPVANRKESSMKTGTATTRRRLLAVLIALALPGAAVALLAEPSATGASDPCAASEVARTVGSVAKSMGDYLDSHPETNQVMTAVLQQQVGPGSVASLKAHFEANPKVASD

SEQ ID NO: 14 - DNA, 960 bp, Mycobacterium tuberculosis
  CDS (1)..(171)
  CDS (175)..(291)
  CDS (295)..(327)
  CDS (331)..(369)
  CDS (373)..(660)
  CDS (664)..(705)
  CDS (709)..(867)
  CDS (874)..(894)
  CDS (898)..(918)
  CDS (922)..(960)
atcgcctttgacgcctattcggtcgcgcagctttttggcgacgtcactggtgcccgcgttgcgggcgtccagccgcagcgacaccacatacggccggtccggttgcgggggccgttgggtggggttgggtgcctccgtcaccccaggcagttcgctggctatttgtcgcagtagcgcgacggcattgtcgatgtcttggtagctagcatccggtcggggggccgctaccagcgccagcgccggggctccccggtccgggtagtgcgcgtcgagttggtcgtggaccagcaatgactgcgacccggcgacttcgaaaccgccaccggttagattccccgactgcgtcatcgccaggtaaaccgccggcactaacgccagcaaccaacccgtgaagaccaaccaacggcacctgcgcaggttgcggctcaaccgcatcatgaactgctggatttcggactccccgtactctcgcgcagtgcgtgcccgcgagcctaccgaagatcgcgtgcatgcgttcggcgtggaccgcacagcacctggagttggcggcgccgagggccgagatggcaggatgacggatcgtcgggggcgggaactcccaggccgccggaccgtcgcaaacccgtcgcaaacccgtcgcaaaccgtaaggagtcatccatgaagacaggcaccgcgacgacgcggcgcaggctgttggcagtactgatcgccctcgcgttgccgggggccgccgttgcgctgctggccgaaccatcagcgaccggcgcgtcggacccgtgcgcggccagcgaagtggcgaggacggtcggttcggtcgccaagtcgatgggcgactacctggattcacacccagagaccaaccaggtgatgaccgcggtcttgcagcagcaggtagggccggggtcggtcgcatcgctgaaggcccatttcgaggcgaatcccaaggtcgcatcggatc

SEQ ID NO: 15 - protein, 57 aa, Mycobacterium tuberculosis
IAFDAYSVAQLFGDVTGARVAGVQPQRHHIRPVRLRGPLGGVGCLRHPRQFAGYLSQ

SEQ ID NO: 16 - protein, 39 aa, Mycobacterium tuberculosis
RDGIVDVLVASIRSGGRYQRQRRGSPVRVVRVELVVDQQ

SEQ ID NO: 17 - protein, 11 aa, Mycobacterium tuberculosis
LRPGDFETATG

SEQ ID NO: 18 - protein, 13 aa, Mycobacterium tuberculosis
IPRLRHRQVNRRH

SEQ ID NO: 19 - protein, 96 aa, Mycobacterium tuberculosis
RQQPTREDQPTAPAQVAAQPHHELLDFGLPVLSRSACPRAYRRSRACVRRGPHSTWSWRRRGPRWQDDGSSGAGTPRPPDRRKPVANPSQTVRSHP

SEQ ID NO: 20 - protein, 14 aa, Mycobacterium tuberculosis
RQAPRRRGAGCWQY

SEQ ID NO: 21 - protein, 53 aa, Mycobacterium tuberculosis
SPSRCRGPPLRCWPNHQRPARRTRARPAKWRGRSVRSPSRWATTWIHTQRPTR

SEQ ID NO: 22 - protein, 7 aa, Mycobacterium tuberculosis
PRSCSSR

SEQ ID NO: 23 - protein, 7 aa, Mycobacterium tuberculosis
GRGRSHR

SEQ ID NO: 24 - protein, 13 aa, Mycobacterium tuberculosis
RPISRRIPRSHRI

SEQ ID NO: 25 - DNA, 959 bp, Mycobacterium tuberculosis
  CDS (1)..(198)
  CDS (202)..(258)
  CDS (262)..(354)
  CDS (358)..(645)
  CDS (649)..(957)
tcgcctttgacgcctattcggtcgcgcagctttttggcgacgtcactggtgcccgcgttgcgggcgtccagccgcagcgacaccacatacggccggtccggttgcgggggccgttgggtggggttgggtgcctccgtcaccccaggcagttcgctggctatttgtcgcagtagcgcgacggcattgtcgatgtcttggtagctagcatccggtcggggggccgctaccagcgccagcgccggggctccccggtccgggtagtgcgcgtcgagttggtcgtggaccagcaatgactgcgacccggcgacttcgaaaccgccaccggttagattccccgactgcgtcatcgccaggtaaaccgccggcactaacgccagcaaccaacccgtgaagaccaaccaacggcacctgcgcaggttgcggctcaaccgcatcatgaactgctggatttcggactccccgtactctcgcgcagtgcgtgcccgcgagcctaccgaagatcgcgtgcatgcgttcggcgtggaccgcacagcacctggagttggcggcgccgagggccgagatggcaggatgacggatcgtcgggggcgggaactcccaggccgccggaccgtcgcaaacccgtcgcaaacccgtcgcaaaccgtaaggagtcatccatgaagacaggcaccgcgacgacgcggcgcaggctgttggcagtactgatcgccctcgcgttgccgggggccgccgttgcgctgctggccgaaccatcagcgaccggcgcgtcggacccgtgcgcggccagcgaagtggcgaggacggtcggttcggtcgccaagtcgatgggcgactacctggattcacacccagagaccaaccaggtgatgaccgcggtcttgcagcagcaggtagggccggggtcggtcgcatcgctgaaggcccatttcgaggcgaatcccaaggtcgcatcggatc

SEQ ID NO: 26 - protein, 66 aa, Mycobacterium tuberculosis
SPLTPIRSRSFLATSLVPALRASSRSDTTYGRSGCGGRWVGLGASVTPGSSLAICRSSATALSMSW

SEQ ID NO: 27 - protein, 19 aa, Mycobacterium tuberculosis
LASGRGAATSASAGAPRSG

SEQ ID NO: 28 - protein, 31 aa, Mycobacterium tuberculosis
CASSWSWTSNDCDPATSKPPPVRFPDCVIAR

SEQ ID NO: 29 - protein, 96 aa, Mycobacterium tuberculosis
TAGTNASNQPVKTNQRHLRRLRLNRIMNCWISDSPYSRAVRAREPTEDRVHAFGVDRTAPGVGGAEGRDGRMTDRRGRELPGRRTVANPSQTRRKP

SEQ ID NO: 30 - protein, 103 aa, Mycobacterium tuberculosis
GVIHEDRHRDDAAQAVGSTDRPRVAGGRRCAAGRTISDRRVGPVRGQRSGEDGRFGRQVDGRLPGFTPRDQPGDDRGLAAAGRAGVGRIAEGPFRGESQGRIG

SEQ ID NO: 31 - DNA, 411 bp, Mycobacterium tuberculosis
  CDS (1)..(408)
atgaagacaggcaccgcgacgacgcggcgcaggctgttggcagtactgatcgccctcgcgttgccgggggccgccgttgcgctgctggccgaaccatcagcgaccggcgcgtcggacccgtgcgcggccagcgaagtggcgaggacggtcggttcggtcgccaagtcgatgggcgactacctggattcacacccagagaccaaccaggtgatgaccgcggtcttgcagcagcaggtagggccggggtcggtcgcatcgctgaaggcccatttcgaggcgaatcccaaggtcgcatcggatctgcacgcgctttcgcaaccgctgaccgatctttcgactcggtgctcgctgccgatcagcggcctgcaggcgatcggtttgatgcaggcggtgcagggcgcccgccggtag

SEQ ID NO: 32 - protein, 136 aa, Mycobacterium tuberculosis
MKTGTATTRRRLLAVLIALALPGAAVALLAEPSATGASDPCAASEVARTVGSVAKSMGDYLDSHPETNQVMTAVLQQQVGPGSVASLKAHFEANPKVASDLHALSQPLTDLSTRCSLPISGLQAIGLMQAVQGARR

SEQ ID NO: 33 - DNA, 498 bp, Mycobacterium tuberculosis
  CDS (4)..(495)
tgacggatcgtcgggggcgggaactcccaggccgccggaccgtcgcaaacccgtcgcaaacccgtcgcaaaccgtaaggagtcatccatgaagacaggcaccgcgacgacgcggcgcaggctgttggcagtactgatcgccctcgcgttgccgggggccgccgttgcgctgctggccgaaccatcagcgaccggcgcgtcggacccgtgcgcggccagcgaagtggcgaggacggtcggttcggtcgccaagtcgatgggcgactacctggattcacacccagagaccaaccaggtgatgaccgcggtcttgcagcagcaggtagggccggggtcggtcgcatcgctgaaggcccatttcgaggcgaatcccaaggtcgcatcggatctgcacgcgctttcgcaaccgctgaccgatctttcgactcggtgctcgctgccgatcagcggcctgcaggcgatcggtttgatgcaggcggtgcagggcgcccgccggtag

SEQ ID NO: 34 - protein, 164 aa, Mycobacterium tuberculosis
RIVGGGNSQAAGPSQTRRKPVANRKESSMKTGTATTRRRLLAVLIALALPGAAVALLAEPSATGASDPCAASEVARTVGSVAKSMGDYLDSHPETNQVMTAVLQQQVGPGSVASLKAHFEANPKVASDLHALSQPLTDLSTRCSLPISGLQAIGLMQAVQGARR

SEQ ID NO: 35 - DNA, 1063 bp, Mycobacterium tuberculosis
  CDS (53)..(82)
  CDS (180)..(437)
  CDS (451)..(858)
  CDS (862)..(1062)
ccggtcggggggccgctaccagcgccagcgccggggctccccggtccgggtagtgcgcgtcgagttggtcgtggaccagcaatgactgcgacccggcgacttcgaaaccgccaccggttagattccccgactgcgtcatcgccaggtaaaccgccggcactaacgccagcaaccaacccgtgaagaccaaccaacggcacctgcgcaggttgcggctcaaccgcatcatgaactgctggatttcggactccccgtactctcgcgcagtgcgtgcccgcgagcctaccgaagatcgcgtgcatgcgttcggcgtggaccgcacagcacctggagttggcggcgccgagggccgagatggcaggatgacggatcgtcgggggcgggaactcccaggccgccggaccgtcgcaaacccgtcgcaaacccgtcgcaaaccgtaaggagtcatccatgaagacaggcaccgcgacgacgcggcgcaggctgttggcagtactgatcgccctcgcgttgccgggggccgccgttgcgctgctggccgaaccatcagcgaccggcgcgtcggacccgtgcgcggccagcgaagtggcgaggacggtcggttcggtcgccaagtcgatgggcgactacctggattcacacccagagaccaaccaggtgatgaccgcggtcttgcagcagcaggtagggccggggtcggtcgcatcgctgaaggcccatttcgaggcgaatcccaaggtcgcatcggatctgcacgcgctttcgcaaccgctgaccgatctttcgactcggtgctcgctgccgatcagcggcctgcaggcgatcggtttgatgcaggcggtgcagggcgcccgccggtagatgccggaccgccgccgggtccggcgcagtcgacgtgaggcagcggtcgcctaccggggcggtgtctcgccgccttctggtcgcaggtcaggggtcggcgctggaccttgcggtgtggtttcgaccgggtcgtcgcagggtgtgccctgcggttggatgacaagtcgcaggtttggatcggttggcgggtcgcgatcgttgt

SEQ ID NO: 36 - protein, 299 aa, Mycobacterium tuberculosis
VRVELVVDQQVKTNQRHLRRLRLNRIMNCWISDSPYSRAVRAREPTEDRVHAFGVDRTAPGVGGAEGRDGRMTDRRGRELPGRRTVANPSQTRRKPMKTGTATTRRRLLAVLIALALPGAAVALLAEPSATGASDPCAASEVARTVGSVAKSMGDYLDSHPETNQVMTAVLQQQVGPGSVASLKAHFEANPKVASDLHALSQPLTDLSTRCSLPISGLQAIGLMQAVQGARRMPDRRRVRRSRREAAVAYRGGVSPPSGRRSGVGAGPCGVVSTGSSQGVPCGWMTSRRFGSVGGSRSL

SEQ ID NO: 37 - protein, 10 aa, Mycobacterium tuberculosis
VRVELVVDQQ

SEQ ID NO: 38 - protein, 86 aa, Mycobacterium tuberculosis
VKTNQRHLRRLRLNRIMNCWISDSPYSRAVRAREPTEDRVHAFGVDRTAPGVGGAEGRDGRMTDRRGRELPGRRTVANPSQTRRKP

SEQ ID NO: 39 - protein, 136 aa, Mycobacterium tuberculosis; identical to SEQ ID NO: 32

SEQ ID NO: 40 - protein, 67 aa, Mycobacterium tuberculosis
MPDRRRVRRSRREAAVAYRGGVSPPSGRRSGVGAGPCGVVSTGSSQGVPCGWMTSRRFGSVGGSRSL

SEQ ID NO: 41 - DNA, 304 bp, Mycobacterium tuberculosis
  CDS (1)..(21)
  CDS (28)..(60)
  CDS (64)..(120)
  CDS (124)..(303)
tcgccggctcgcggacgtagataatagctcaccgttggacgacctcgacagggtcctttgtgactgccgggcttgacgcggacgaccacagagtcgggtcatcgcctaaggctaccgttctgacctggggtgcgtgggcgccgacgagtgaggcagtcatgtctcagggcccaccgccacctcggtcgccggcagtgtcagcatgtgcagatgactccacgcagcttgttcgtgttggtgtcgtggttgcgacgacttggcgctggtgagcgcacccgccggcgtcgtgccgcgcatgcggatc

SEQ ID NO: 42 - protein, 7 aa, Mycobacterium tuberculosis
SPARGRR

SEQ ID NO: 43 - protein, 11 aa, Mycobacterium tuberculosis
LTVGRPRQGPL

SEQ ID NO: 44 - protein, 19 aa, Mycobacterium tuberculosis
LPGLTRTTTESGHRLRLPF

SEQ ID NO: 45 - protein, 60 aa, Mycobacterium tuberculosis
PGVRGRRRVRQSCLRAHRHLGRRQCQHVQMTPRSLFVLVSWLRRLGAGERTRRRRAAHAD

SEQ ID NO: 46 - DNA, 303 bp, Mycobacterium tuberculosis
  CDS (1)..(72)
  CDS (76)..(105)
  CDS (109)..(147)
  CDS (151)..(210)
  CDS (214)..(303)
cgccggctcgcggacgtagataatagctcaccgttggacgacctcgacagggtcctttgtgactgccgggcttgacgcggacgaccacagagtcgggtcatcgcctaaggctaccgttctgacctggggtgcgtgggcgccgacgagtgaggcagtcatgtctcagggcccaccgccacctcggtcgccggcagtgtcagcatgtgcagatgactccacgcagcttgttcgtgttggtgtcgtggttgcgacgacttggcgctggtgagcgcacccgccggcgtcgtgccgcgcatgcggatc

SEQ ID NO: 47 - protein, 24 aa, Mycobacterium tuberculosis
RRLADVDNSSPLDDLDRVLCDCRA

SEQ ID NO: 48 - protein, 10 aa, Mycobacterium tuberculosis
RGRPQSRVIA

SEQ ID NO: 49 - protein, 13 aa, Mycobacterium tuberculosis
GYRSDLGCVGADE

SEQ ID NO: 50 - protein, 20 aa, Mycobacterium tuberculosis
GSHVSGPTATSVAGSVSMCR

SEQ ID NO: 51 - protein, 30 aa, Mycobacterium tuberculosis
LHAACSCWCRGCDDLALVSAPAGVVPRMRI

SEQ ID NO: 52 - DNA, 302 bp, Mycobacterium tuberculosis
  CDS (1)..(15)
  CDS (19)..(264)
  CDS (268)..(300)
gccggctcgcggacgtagataatagctcaccgttggacgacctcgacagggtcctttgtgactgccgggcttgacgcggacgaccacagagtcgggtcatcgcctaaggctaccgttctgacctggggtgcgtgggcgccgacgagtgaggcagtcatgtctcagggcccaccgccacctcggtcgccggcagtgtcagcatgtgcagatgactccacgcagcttgttcgtgttggtgtcgtggttgcgacgacttggcgctggtgagcgcacccgccggcgtcgtgccgcgcatgcggatc

SEQ ID NO: 53 - protein, 5 aa, Mycobacterium tuberculosis
AGSRT

SEQ ID NO: 54 - protein, 82 aa, Mycobacterium tuberculosis
IIAHRWTTSTGSFVTAGLDADDHRVGSSPKATVLTWGAWAPTSEAVMSQGPPPPRSPAVSACADDSTQLVRVGVVVATTWRW

SEQ ID NO: 55 - protein, 11 aa, Mycobacterium tuberculosis
AHPPASCRACG

SEQ ID NO: 56 - DNA, 389 bp, Mycobacterium tuberculosis
  CDS (1)..(114)
  CDS (118)..(183)
  CDS (187)..(237)
  CDS (241)..(282)
  CDS (286)..(387)
ccaattttccttcgcgccgtgcaataccatctgcaagaccagcgacggcccgtggttgcggtcgcgcagcttgcggaaaccgggtatggaccctgccgtaccgttgttgccacttgatgtcgtcgctctccacccgtcggggggcgaaagccattccgacactgggatcctcaaaacgtcggctgagtgtctgcagggctccggggagcagccgatcatcaccatgtacgaactgaataagtcccccgcgcgcgacttccagacatttgttgtggtttcggttgaggccgaggcgaggctcatttcgcagcaaccggtctccgggtcgcagcatcgttgcggcgatcgcggcgcagtcgtcggacgagtcgtcgtcaacgaccacgatc

SEQ ID NO: 57 - protein, 38 aa, Mycobacterium tuberculosis
PIFLRAVQYHLQDQRRPVVAVAQLAETGYGPCRTVVAT

SEQ ID NO: 58 - protein, 22 aa, Mycobacterium tuberculosis
CRRSPPVGGRKPFRHWDPQNVG

SEQ ID NO: 59 - protein, 17 aa, Mycobacterium tuberculosis
VSAGLRGAADHHHVRTE

SEQ ID NO: 60 - protein, 14 aa, Mycobacterium tuberculosis
VPRARLPDICCGFG

SEQ ID NO: 61 - protein, 34 aa, Mycobacterium tuberculosis
GRGEAHFAATGLRVAASLRRSRRSRRTSRRQRPR

SEQ ID NO: 62 - DNA, 388 bp, Mycobacterium tuberculosis
  CDS (1)..(387)
caattttccttcgcgccgtgcaataccatctgcaagaccagcgacggcccgtggttgcggtcgcgcagcttgcggaaaccgggtatggaccctgccgtaccgttgttgccacttgatgtcgtcgctctccacccgtcggggggcgaaagccattccgacactgggatcctcaaaacgtcggctgagtgtctgcagggctccggggagcagccgatcatcaccatgtacgaactgaataagtcccccgcgcgcgacttccagacatttgttgtggtttcggttgaggccgaggcgaggctcatttcgcagcaaccggtctccgggtcgcagcatcgttgcggcgatcgcggcgcagtcgtcggacgagtcgtcgtcaacgaccacgatc

SEQ ID NO: 63 - protein, 129 aa, Mycobacterium tuberculosis
QFSFAPCNTICKTSDGPWLRSRSLRKPGMDPAVPLLPLDVVALHPSGGESHSDTGILKTSAECLQGSGEQPIITMYELNKSPARDFQTFVVVSVEAEARLISQQPVSGSQHRCGDRGAVVGRVVVNDHD

SEQ ID NO: 64 - DNA, 387 bp, Mycobacterium tuberculosis
  CDS (1)..(231)
  CDS (235)..(387)
aattttccttcgcgccgtgcaataccatctgcaagaccagcgacggcccgtggttgcggtcgcgcagcttgcggaaaccgggtatggaccctgccgtaccgttgttgccacttgatgtcgtcgctctccacccgtcggggggcgaaagccattccgacactgggatcctcaaaacgtcggctgagtgtctgcagggctccggggagcagccgatcatcaccatgtacgaactgaataagtcccccgcgcgcgacttccagacatttgttgtggtttcggttgaggccgaggcgaggctcatttcgcagcaaccggtctccgggtcgcagcatcgttgcggcgatcgcggcgcagtcgtcggacgagtcgtcgtcaacgaccacgatc

SEQ ID NO: 65 - protein, 77 aa, Mycobacterium tuberculosis
NFPSRRAIPSARPATARGCGRAACGNRVWTLPYRCCHLMSSLSTRRGAKAIPTLGSSKRRLSVCRAPGSSRSSPCTN

SEQ ID NO: 66 - protein, 51 aa, Mycobacterium tuberculosis
ISPPRATSRHLLWFRLRPRRGSFRSNRSPGRSIVAAIAAQSSDESSSTTTI

SEQ ID NO: 67 - DNA, 144 bp, Mycobacterium tuberculosis
  CDS (1)..(144)
ccgcgcgcgacttccagacatttgttgtggtttcggttgaggccgaggcgaggctcatttcgcagcaagcggtctccgggtcgcagcatcgttgcggcgatcgcggcgcagtcgtcggacgagtcgtcgtcaacgaccacgatc

SEQ ID NO: 68 - protein, 48 aa, Mycobacterium tuberculosis
PRATSRHLLWFRLRPRRGSFRSKRSPGRSIVAAIAAQSSDESSSTTTI

SEQ ID NO: 69 - DNA, 143 bp, Mycobacterium tuberculosis
  CDS (1)..(36)
  CDS (40)..(141)
cgcgcgcgacttccagacatttgttgtggtttcggttgaggccgaggcgaggctcatttcgcagcaagcggtctccgggtcgcagcatcgttgcggcgatcgcggcgcagtcgtcggacgagtcgtcgtcaacgaccacgatc

SEQ ID NO: 70 - protein, 12 aa, Mycobacterium tuberculosis
RARLPDICCGFG

SEQ ID NO: 71 - protein, 34 aa, Mycobacterium tuberculosis
GRGEAHFAASGLRVAASLRRSRRSRRTSRRQRPR

SEQ ID NO: 72 - DNA, 145 bp, Mycobacterium tuberculosis
  CDS (1)..(144)
gccgcgcgcgacttccagacatttgttgtggtttcggttgaggccgaggcgaggctcatttcgcagcaagcggtctccgggtcgcagcatcgttgcggcgatcgcggcgcagtcgtcggacgagtcgtcgtcaacgaccacgatc

SEQ ID NO: 73 - protein, 48 aa, Mycobacterium tuberculosis
AARDFQTFVVVSVEAEARLISQQAVSGSQHRCGDRGAVVGRVVVNDHD

SEQ ID NO: 74 - DNA, 318 bp, Mycobacterium tuberculosis
  CDS (4)..(315)
tgaataagtccgccgcgcgcgacttccagacatttgttgtggtttcggttgaggccgaggcgaggctcatttcgcagcaagcggtctccgggtcgcagcatcgttgcggcgatcgcggcgcagtcgtcggacgagtcgtcgtcaacgaccacgatctcgaactcgacgccctcctgttcgaggatgctacgcagacagcgctcgatggtggcgccgttgttgtacatcgggatgcacaccgagataagcggtttcgccgggttcaccgataccacgcttgatgcatcaccaggcaccacatggcgactcagagactag

SEQ ID NO: 75 - protein, 104 aa, Mycobacterium tuberculosis
ISPPRATSRHLLWFRLRPRRGSFRSKRSPGRSIVAAIAAQSSDESSSTTTISNSTPSCSRMLRRQRSMVAPLLYIGMHTEISGFAGFTDTTLDASPGTTWRLRD

SEQ ID NO: 76 - DNA, 61 bp, Mycobacterium tuberculosis
  CDS (1)..(60)
gcaacctaccagcagagccaggggctcacaggacctaaaggagtagcgcccatggctgatc

SEQ ID NO: 77 - protein, 20 aa, Mycobacterium tuberculosis
ATYQQSQGLTGPKGVAPMAD

SEQ ID NO: 78 - DNA, 63 bp, Mycobacterium tuberculosis
  CDS (1)..(45)
  CDS (49)..(63)
acgcaacctaccagcagagccaggggctcacaggacctaaaggagtagcgcccatggctgatc

SEQ ID NO: 79 - protein, 15 aa, Mycobacterium tuberculosis
TQPTSRARGSQDLKE

SEQ ID NO: 80 - protein, 5 aa, Mycobacterium tuberculosis
RPWLI

SEQ ID NO: 81 - DNA, 62 bp, Mycobacterium tuberculosis
  CDS (1)..(36)
  CDS (40)..(57)
cgcaacctaccagcagagccaggggctcacaggacctaaaggagtagcgcccatggctgatc

SEQ ID NO: 82 - protein, 12 aa, Mycobacterium tuberculosis
RNLPAEPGAHRT

SEQ ID NO: 83 - protein, 6 aa, Mycobacterium tuberculosis
RSSAHG

SEQ ID NO: 84 - DNA, 336 bp, Mycobacterium tuberculosis
  CDS (1)..(333)
atggctgatcgtgtcctgaggggcagtcgcctcggagccgtgagctatgagaccgaccgcaaccacgacctggcgccgcgccagatcgcgcggtaccgcaccgacaacggcgaggagttcgaagtcccgttcgccgatgacgccgagatccccggcacctggttgtgccgcaacggcatggaaggcaccctgatcgagggcgacctgcccgagccgaagaaggttaagccgccccggacgcactgggacatgctgctggagcgccgttccatcgaagaactcgaagagttacttaaggagcgcctcgagctcattcggtcacgtcggcgcggctga

SEQ ID NO: 85 - protein, 111 aa, Mycobacterium tuberculosis
MADRVLRGSRLGAVSYETDRNHDLAPRQIARYRTDNGEEFEVPFADDAEIPGTWLCRNGMEGTLIEGDLPEPKKVKPPRTHWDMLLERRSIEELEELLKERLELIRSRRRG

SEQ ID NO: 86 - DNA, 501 bp, Mycobacterium tuberculosis
  CDS (4)..(498)
tagtccgcccgggtgtccgatcccggtatcattgatggtcgcgccgcgcgcgtcgcgtgccgggaactacgcagacggccgcagcgtttgccaaccggagccagtcgccagtacgcaacctaccagcagagcccagggctcacaggacctaaaggagtagcgcccatggctgatcgtgtcctgaggggcagtcgcctcggagccgtgagctatgagaccgaccgcaaccacgacctggcgccgcgccagatcgcgcggtaccgcaccgacaacggcgaggagttcgaagtcccgttcgccgatgacgccgagatccccggcacctggttgtgccgcaacggcatggaaggcaccctgatcgagggcgacctgcccgagccgaagaaggttaagccgccccggacgcactgggacatgctgctggagcgccgttccatcgaagaactcgaagagttacttaaggagcgcctcgagctcattcggtcacgtcggcgcggctga

SEQ ID NO: 87 - protein, 165 aa, Mycobacterium tuberculosis
SARVSDPGIIDGRAARVACRELRRRPQRLPTGASRQYATYQQSPGLTGPKGVAPMADRVLRGSRLGAVSYETDRNHDLAPRQIARYRTDNGEEFEVPFADDAEIPGTWLCRNGMEGTLIEGDLPEPKKVKPPRTHWDMLLERRSIEELEELLKERLELIRSRRRG

SEQ ID NO: 88 - DNA, 316 bp, Mycobacterium tuberculosis
  CDS (1)..(315)
gatcgcggtcaacgaggccgaatacggcgagatgtgggcccaagacgccgccgcgatgtttggctacgccgcggcgacggcgacggcgacggcgacgttgctgccgttcgaggaggcgccggagatgaccagcgcgggtgggctcctcgagcaggccgccgcggtcgaggaggcctccgacaccgccgcggcgaaccagttgatgaacaatgtgccccaggcgctgcaacagctggcccagcccacgcagggcaccacgccttcttccaagctgggtggcctgtggaagacggtctcgccgcatcggtcgccgatc

SEQ ID NO: 89 - protein, 105 aa, Mycobacterium tuberculosis
DRGQRGRIRRDVGPRRRRDVWLRRGDGDGDGDVAAVRGGAGDDQRGWAPRAGRRGRGGLRHRRGEPVDEQCAPGAATAGPAHAGHHAFFQAGWPVEDGLAASVAD

SEQ ID NO: 90 - DNA, 315 bp, Mycobacterium tuberculosis
  CDS (1)..(315)
atcgcggtcaacgaggccgaatacggcgagatgtgggcccaagacgccgccgcgatgtttggctacgccgcggcgacggcgacggcgacggcgacgttgctgccgttcgaggaggcgccggagatgaccagcgcgggtgggctcctcgagcaggccgccgcggtcgaggaggcctccgacaccgccgcggcgaaccagttgatgaacaatgtgccccaggcgctgcaacagctggcccagcccacgcagggcaccacgccttcttccaagctgggtggcctgtggaagacggtctcgccgcatcggtcgccgatc

SEQ ID NO: 91 - protein, 105 aa, Mycobacterium tuberculosis
IAVNEAEYGEMWAQDAAAMFGYAAATATATATLLPFEEAPEMTSAGGLLEQAAAVEEASDTAAANQLMNNVPQALQQLAQPTQGTTPSSKLGGLWKTVSPHRSPI

SEQ ID NO: 92 - DNA, 314 bp, Mycobacterium tuberculosis
  CDS (1)..(23)
  CDS (127)..(198)
  CDS (205)..(312)
tcgcggtcaacgaggccgaatacggcgagatgtgggcccaagacgccgccgcgatgtttggctacgccgcggcgacggcgacggcgacggcgacgttgctgccgttcgaggaggcgccggagatgaccagcgcgggtgggctcctcgagcaggccgccgcggtcgaggaggcctccgacaccgccgcggcgaaccagttgatgaacaatgtgccccaggcgctgcaacagctggcccagcccacgcagggcaccacgccttcttccaagctgggtggcctgtggaagacggtctcgccgcatcggtcgccgatc

SEQ ID NO: 93 - protein, 41 aa, Mycobacterium tuberculosis
SRSTRPNTARCGPKTPPRCLATPRRRRRRRRRCCRSRRRRR

SEQ ID NO: 94 - protein, 24 aa, Mycobacterium tuberculosis
PARVGSSSRPPRSRRPPTPPRRTS

SEQ ID NO: 95 - protein, 36 aa, Mycobacterium tuberculosis
TMCPRRCNSWPSPRRAPRLLPSWVACGRRSRRIGRR

SEQ ID NO: 96 - DNA, 250 bp, Mycobacterium tuberculosis
  CDS (1)..(249)
cgccgcggcgacggcgacggcgacggcgacgttgctgccgttcgaggaggcgccggagatgaccagcgcgggtgggctcctcgagcaggccgccgcggtcgaggaggcctccgacaccgccgcggcgaaccagttgatgaacaatgtgccccaggcgctgcaacagctggcccagcccacgcagggcaccacgccttcttccaagctgggtggcctgtggaagacggtctcgccgcatcggtcgccgatc

SEQ ID NO: 97 - protein, 83 aa, Mycobacterium tuberculosis
RRGDGDGDGDVAAVRGGAGDDQRGWAPRAGRRGRGGLRHRRGEPVDEQCAPGAATAGPAHAGHHAFFQAGWPVEDGLAASVAD

SEQ ID NO: 98 - DNA, 252 bp, Mycobacterium tuberculosis
  CDS (1)..(252)
tacgccgcggcgacggcgacggcgacggcgacgttgctgccgttcgaggaggcgccggagatgaccagcgcgggtgggctcctcgagcaggccgccgcggtcgaggaggcctccgacaccgccgcggcgaaccagttgatgaacaatgtgccccaggcgctgcaacagctggcccagcccacgcagggcaccacgccttcttccaagctgggtggcctgtggaagacggtctcgccgcatcggtcgccgatc

SEQ ID NO: 99 - protein, 84 aa, Mycobacterium tuberculosis
YAAATATATATLLPFEEAPEMTSAGGLLEQAAAVEEASDTAAANQLMNNVPQALQQLAQPTQGTTPSSKLGGLWKTVSPHRSPI

SEQ ID NO: 100 - DNA, 251 bp, Mycobacterium tuberculosis
  CDS (1)..(60)
  CDS (64)..(135)
  CDS (142)..(249)
acgccgcggcgacggcgacggcgacggcgacgttgctgccgttcgaggaggcgccggagatgaccagcgcgggtgggctcctcgagcaggccgccgcggtcgaggaggcctccgacaccgccgcggcgaaccagttgatgaacaatgtgccccaggcgctgcaacagctggcccagcccacgcagggcaccacgccttcttccaagctgggtggcctgtggaagacggtctcgccgcatcggtcgccgatc

SEQ ID NO: 101 - protein, 20 aa, Mycobacterium tuberculosis
TPRRRRRRRRRCCRSRRRRR

SEQ ID NO: 102 - protein, 24 aa, Mycobacterium tuberculosis
PARVGSSSRPPRSRRPPTPPRRTS

SEQ ID NO: 103 - protein, 36 aa, Mycobacterium tuberculosis; identical to SEQ ID NO: 95

SEQ ID NO: 104 - DNA, 858 bp, Mycobacterium tuberculosis
  CDS (4)..(855)
tgaactgatgattctgatagcgaccaacctcttggggcaaaacaccccggcgatcgcggtcaacgaggccgaatacggcgagatgtgggcccaagacgccgccgcgatgtttggctacgccgcggcgacggcgacggcgacggcgacgttgctgccgttcgaggaggcgccggagatgaccagcgcgggtgggctcctcgagcaggccgccgcggtcgaggaggcctccgacaccgccgcggcgaaccagttgatgaacaatgtgccccaggcgctgcaacagctggcccagcccacgcagggcaccacgccttcttccaagctgggtggcctgtggaagacggtctcgccgcatcggtcgccgatcagcaacatggtgtcgatggccaacaaccacatgtcgatgaccaactcgggtgtgtcgatgaccaacaccttgagctcgatgttgaagggctttgctccggcggcggccgcccaggccgtgcaaaccgcggcgcaaaacggggtccgggcgatgagctcgctgggcagctcgctgggttcttcgggtctgggcggtggggtggccgccaacttgggtcgggcggcctcggtcggttcgttgtcggtgccgcaggcctgggccgcggccaaccaggcagtcaccccggcggcgcgggcgctgccgctgaccagcctgaccagcgccgcggaaagagggcccgggcagatgctgggcgggctgccggtggggcagatgggcgccagggccggtggtgggctcagtggtgtgctgcgtgttccgccgcgaccctatgtgatgccgcattctccggcggccggctaggagagggggcgcagactgtcgttatttga

SEQ ID NO: 105 - protein, 284 aa, Mycobacterium tuberculosis
TDDSDSDQPLGAKHPGDRGQRGRIRRDVGPRRRRDVWLRRGDGDGDGDVAAVRGGAGDDQRGWAPRAGRRGRGGLRHRRGEPVDEQCAPGAATAGPAHAGHHAFFQAGWPVEDGLAASVADQQHGVDGQQPHVDDQLGCVDDQHLELDVEGLCSGGGRPGRANRGAKRGPGDELAGQLAGFFGSGRWGGRQLGSGGLGRFVVGAAGLGRGQPGSHPGGAGAAADQPDQRRGKRARADAGRAAGGADGRQGRWWAQWCAACSAATLCDAAFSGGRLGEGAQTVVI

SEQ ID NO: 106 - DNA, 1176 bp, Mycobacterium tuberculosis
  CDS (1)..(1173)
atggtggatttcggggcgttaccaccggagatcaactccgcgaggatgtacgccggcccgggttcggcctcgctggtggccgcggctcagatgtgggacagcgtggcgagtgacctgttttcggccgcgtcggcgtttcagtcggtggtctggggtctgacggtggggtcgtggataggttcgtcggcgggtctgatggtggcggcggcctcgccgtatgtggcgtggatgagcgtcaccgcggggcaggccgagctgaccgccgcccaggtccgggttgctgcggcggcctacgagacggcgtatgggctgacggtgcccccgccggtgatcgccgagaaccgtgctgaactgatgattctgatagcgaccaacctcttggggcaaaacaccccggcgatcgcggtcaacgaggccgaatacggcgagatgtgggcccaagacgccgccgcgatgtttggctacgccgcggcgacggcgacggcgacggcgacgttgctgccgttcgaggaggcgccggagatgaccagcgcgggtgggctcctcgagcaggccgccgcggtcgaggaggcctccgacaccgccgcggcgaaccagttgatgaacaatgtgccccaggcgctgcaacagctggcccagcccacgcagggcaccacgccttcttccaagctgggtggcctgtggaagacggtctcgccgcatcggtcgccgatcagcaacatggtgtcgatggccaacaaccacatgtcgatgaccaactcgggtgtgtcgatgaccaacaccttgagctcgatgttgaagggctttgctccggcggcggccgcccaggccgtgcaaaccgcggcgcaaaacggggtccgggcgatgagctcgctgggcagctcgctgggttcttcgggtctgggcggtggggtggccgccaacttgggtcgggcggcctcggtcggttcgttgtcggtgccgcaggcctgggccgcggccaaccaggcagtcaccccggcggcgcgggcgctgccgctgaccagcctgaccagcgccgcggaaagagggcccgggcagatgctgggcgggctgccggtggggcagatgggcgccagggccggtggtgggctcagtggtgtgctgcgtgttccgccgcgaccctatgtgatgccgcattctccggcggccggctag

SEQ ID NO: 107 - protein, 391 aa, Mycobacterium tuberculosis
MVDFGALPPEINSARMYAGPGSASLVAAAQMWDSVASDLFSAASAFQSVVWGLTVGSWIGSSAGLMVAAASPYVAWMSVTAGQAELTAAQVRVAAAAYETAYGLTVPPPVIAENRAELMILIATNLLGQNTPAIAVNEAEYGEMWAQDAAAMFGYAAATATATATLLPFEEAPEMTSAGGLLEQAAAVEEASDTAAANQLMNNVPQALQQLAQPTQGTTPSSKLGGLWKTVSPHRSPISNMVSMANNHMSMTNSGVSMTNTLSSMLKGFAPAAAAQAVQTAAQNGVRAMSSLGSSLGSSGLGGGVAANLGRAASVGSLSVPQAWAAANQAVTPAARALPLTSLTSAAERGPGQMLGGLPVGQMGARAGGGLSGVLRVPPRPYVMPHSPAAG

SEQ ID NO: 108 - DNA, 1188 bp, Mycobacterium tuberculosis
  CDS (4)..(1185)
tagggacacgtaatggtggatttcggggcgttaccaccggagatcaactccgcgaggatgtacgccggcccgggttcggcctcgctggtggccgcggctcagatgtgggacagcgtggcgagtgacctgttttcggccgcgtcggcgtttcagtcggtggtctggggtctgacggtggggtcgtggataggttcgtcggcgggtctgatggtggcggcggcctcgccgtatgtggcgtggatgagcgtcaccgcggggcaggccgagctgaccgccgcccaggtccgggttgctgcggcggcctacgagacggcgtatgggctgacggtgcccccgccggtgatcgccgagaaccgtgctgaactgatgattctgatagcgaccaacctcttggggcaaaacaccccggcgatcgcggtcaacgaggccgaatacggcgagatgtgggcccaagacgccgccgcgatgtttggctacgccgcggcgacggcgacggcgacggcgacgttgctgccgttcgaggaggcgccggagatgaccagcgcgggtgggctcctcgagcaggccgccgcggtcgaggaggcctccgacaccgccgcggcgaaccagttgatgaacaatgtgccccaggcgctgcaacagctggcccagcccacgcagggcaccacgccttcttccaagctgggtggcctgtggaagacggtctcgccgcatcggtcgccgatcagcaacatggtgtcgatggccaacaaccacatgtcgatgaccaactcgggtgtgtcgatgaccaacaccttgagctcgatgttgaagggctttgctccggcggcggccgcccaggccgtgcaaaccgcggcgcaaaacggggtccgggcgatgagctcgctgggcagctcgctgggttcttcgggtctgggcggtggggtggccgccaacttgggtcgggcggcctcggtcggttcgttgtcggtgccgcaggcctgggccgcggccaaccaggcagtcaccccggcggcgcgggcgctgccgctgaccagcctgaccagcgccgcggaaagagggcccgggcagatgctgggcgggctgccggtggggcagatgggcgccagggccggtggtgggctcagtggtgtgctgcgtgttccgccgcgaccctatgtgatgccgcattctccggcggccggctag

SEQ ID NO: 109 - protein, 394 aa, Mycobacterium tuberculosis
GHVMVDFGALPPEINSARMYAGPGSASLVAAAQMWDSVASDLFSAASAFQSVVWGLTVGSWIGSSAGLMVAAASPYVAWMSVTAGQAELTAAQVRVAAAAYETAYGLTVPPPVIAENRAELMILIATNLLGQNTPAIAVNEAEYGEMWAQDAAAMFGYAAATATATATLLPFEEAPEMTSAGGLLEQAAAVEEASDTAAANQLMNNVPQALQQLAQPTQGTTPSSKLGGLWKTVSPHRSPISNMVSMANNHMSMTNSGVSMTNTLSSMLKGFAPAAAAQAVQTAAQNGVRAMSSLGSSLGSSGLGGGVAANLGRAASVGSLSVPQAWAAANQAVTPAARALPLTSLTSAAERGPGQMLGGLPVGQMGARAGGGLSGVLRVPPRPYVMPHSPAAG

SEQ ID NO: 110 - DNA, 433 bp, Mycobacterium tuberculosis
  CDS (1)..(6)
  CDS (10)..(114)
  CDS (118)..(432)
ggatcctgatgcaagtggtccgggatttgtcggcagccaccgcggtcccgtcgaccaacgttggtgcatccgggctgcgagcatgcacgcaccgaccagcgcggcgagcgcggctagctgcttgcccactgttcctccctgccggcaccatgtgcgacaagcttaagcgcagcagtaccggcggtgcctgggcatccagcaaaacggggagctcaagaacgattcatgaacgaggggtcgtcaccaacgtcgaaaccgacggttgccagccggcccacgatattgcgtgctcgagggtccgctgtaccctcaccgaacgtgagtcccacaccgcggaggcgggcgactctggcgtcgttagcagccgagctcaaggtgtcccgcaccactgtctcgaatgcttttaaccgaccggatccagaaggagaagatc

SEQ ID NO: 111 - protein, 35 aa, Mycobacterium tuberculosis
CKWSGICRQPPRSRRPTLVHPGCEHARTDQRGERG

SEQ ID NO: 112 - protein, 105 aa, Mycobacterium tuberculosis
LLAHCSSLPAPCATSLSAAVPAVPGHPAKRGAQERFMNEGSSPTSKPTVASRPTILRARGSAVPSPNVSPTPRRRATLASLAAELKVSRTTVSNAFNRPDPEGED

SEQ ID NO: 113 - DNA, 432 bp, Mycobacterium tuberculosis
  CDS (1)..(162)
  CDS (166)..(225)
  CDS (229)..(318)
  CDS (322)..(357)
  CDS (361)..(432)
gatcctgatgcaagtggtccgggatttgtcggcagccacggcggtcccgtcgaccaacgttggtgcatccgggctgcgagcatgcacgcaccgaccagcgcggcgagcgcggctagctgcttgcccactgttcctccctgccggcaccatgtgcgacaagcttaagcgcagcagtaccggcggtgcctgggcatccagcaaaacggggagctcaagaacgattcatgaacgaggggtcgtcaccaacgtcgaaaccgacggttgccagccggcccacgatattgcgtgctcgagggtccgctgtaccctcaccgaacgtgagtcccacaccgcggaggcgggcgactctggcgtcgttagcagccgagctcaaggtgtcccgcaccactgtctcgaatgcttttaaccgaccggatccagaaggagaagatc

SEQ ID NO: 114 - protein, 54 aa, Mycobacterium tuberculosis
DPDASGPGFVGSHGGPVDQRWCIRAASMHAPTSAASAASCLPTVPPCRHHVRQA

SEQ ID NO: 115 - protein, 20 aa, Mycobacterium tuberculosis
AQQYRRCLGIQQNGELKNDS

SEQ ID NO: 116 - protein, 30 aa, Mycobacterium tuberculosis
TRGRHQRRNRRLPAGPRYCVLEGPLYPHRT

SEQ ID NO: 117 - protein, 12 aa, Mycobacterium tuberculosis
VPHRGGGRLWRR

SEQ ID NO: 118 - protein, 24 aa, Mycobacterium tuberculosis
QPSSRCPAPLSRMLLTDRIQKEKI

SEQ ID NO: 119 - DNA, 431 bp, Mycobacterium tuberculosis
  CDS (1)..(402)
  CDS (406)..(429)
atcctgatgcaagtggtccgggatttgtcggcagccacggcggtcccgtcgaccaacgttggtgcatccgggctgcgagcatgcacgcaccgaccagcgcggcgagcgcggctagctgcttgcccactgttcctccctgccggcaccatgtgcgacaagcttaagcgcagcagtaccggcggtgcctgggcatccagcaaaacggggagctcaagaacgattcatgaacgaggggtcgtcaccaacgtcgaaaccgacggttgccagccggcccacgatattgcgtgctcgagggtccgctgtaccctcaccgaacgtgagtcccacaccgcggaggcgggcgactctggcgtcgttagcagccgagctcaaggtgtcccgcaccactgtctcgaatgcttttaaccgaccggatccagaaggagaagatc

SEQ ID NO: 120 - protein, 134 aa, Mycobacterium tuberculosis
ILMQVVRDLSAATAVPSTNVGASGLRACTHRPARRARLAACPLFLPAGTMCDKLKRSSTGGAWASSKTGSSRTIHERGVVTNVETDGCQPAHDIACSRVRCTLTERESHTAEAGDSGVVSSRAQGVPHHCLECF

SEQ ID NO: 121 - protein, 8 aa, Mycobacterium tuberculosis
PTGSRRRR

SEQ ID NO: 122 - DNA, 324 bp, Mycobacterium tuberculosis
  CDS (1)..(30)
  CDS (34)..(102)
  CDS (106)..(165)
  CDS (169)..(267)
  CDS (271)..(273)
  CDS (277)..(324)
ccgtcggcaacttggccgctgaggtcggcttgatccctgggccgaggcgggtcagccaatagcggctccatcggctttgctggtagcggttcggcgggaagctagcggcgacgttgtcggtggccggtgatatattcggtcagacgggtatggcggcggctgaggtgatctgcgacacgccgccgcggtgctcgagccaggcttacgaccagggaatttcgaaaatgttattcagaacatcttgtatctcttctccgtgccaccccctaggtgtagtgttttcgagtaccggcagatcccaggttcaccaggtctcaccagatc

SEQ ID NO: 123 - protein, 10 aa, Mycobacterium tuberculosis
PSATWPLRSA

SEQ ID NO: 124 - protein, 23 aa, Mycobacterium tuberculosis
SLGRGGSANSGSIGFAGSGSAGS

SEQ ID NO: 125 - protein, 20 aa, Mycobacterium tuberculosis
RRRCRWPVIYSVRRVWRRLR

SEQ ID NO: 126 - protein, 33 aa, Mycobacterium tuberculosis
SATRRRGARARLTTREFRKCYSEHLVSLLRATP

SEQ ID NO: 127 - protein, 16 aa, Mycobacterium tuberculosis
CFRVPADPRFTRSHQI

SEQ ID NO: 128 - DNA, 323 bp, Mycobacterium tuberculosis
  CDS (1)..(18)
  CDS (22)..(126)
  CDS (130)..(159)
  CDS (163)..(321)
cgtcggcaacttggccgctgaggtcggcttgatccctgggccgaggcgggtcagccaatagcggctccatcggctttgctggtagcggttcggcgggaagctagcggcgacgttgtcggtggccggtgatatattgggtcagacgggtatggcggcggctgaggtgatctgcgacacgccgccgcggtgctcgagccaggcttacgaccagggaatttcgaaaatgttattcagaacatcttgtatctcttctccgtgccaccccctaggtgtagtgttttcgagtaccggcagatcccaggttcaccaggtctcaccagatc

SEQ ID NO: 129 - protein, 6 aa, Mycobacterium tuberculosis
RRQLGR

SEQ ID NO: 130 - protein, 35 aa, Mycobacterium tuberculosis
GRLDPWAEAGQPIAAPSALLVAVRREASGDVVGGR

SEQ ID NO: 131 - protein, 10 aa, Mycobacterium tuberculosis
YIGSDGYGGG

SEQ ID NO: 132 - protein, 53 aa, Mycobacterium tuberculosis
GDLRHAAAVLEPGLRPGNFENVIQNILYLFSVPPPRCSVFEYRQIPGSPGLTR

SEQ ID NO: 133 - DNA, 322 bp, Mycobacterium tuberculosis
  CDS (1)..(57)
  CDS (61)..(81)
  CDS (85)..(321)
gtcggcaacttggccgctgaggtcggcttgatccctgggccgaggcgggtcagccaatagcggctccatcggctttgctggtagcggttcggcgggaagctagcggcgacgttgtcggtggccggtgatatattgggtcagacgggtatggcggcggctgaggtgatctgcgacacgccgccgcggtgctcgagccaggcttacgaccagggaatttcgaaaatgttattcagaacatcttgtatctcttctccgtgccaccccctaggtgtagtgttttcgagtaccggcagatcccaggttcaccaggtctcaccagatc

SEQ ID NO: 134 - protein, 19 aa, Mycobacterium tuberculosis
VGNLAAEVGLIPGPRRVSQ

SEQ ID NO: 135 - protein, 7 aa, Mycobacterium tuberculosis
RLHRLCW

SEQ ID NO: 136 - protein, 79 aa, Mycobacterium tuberculosis
RFGGKLAATLSVAGDILGQTGMAAAEVICDTPPRCSSQAYDQGISKMLFRTSCISSPCHPLGVVFSSTGRSQVHQVSPD

SEQ ID NO: 137 - DNA, 432 bp, Mycobacterium tuberculosis
  CDS (1)..(60)
  CDS (64)..(72)
  CDS (76)..(84)
  CDS (88)..(96)
  CDS (100)..(261)
  CDS (265)..(432)
ctttgcgtgatgtccaatggcgaaaacgacgccttgtcatcgcaatcgtcagcaccggcctagttttcgcgatgacgctcgttctgaccggacttgtgaacgggtttcgggtcgaggccgagcgaaccgtcgattccatgggtgtcgacgcattcgtggtcaaggccggcgcggcaggaccgttcctgggttcgacaccattcgcccaaatcgacctgccccaggttgctcgtgcgcctggcgtcttggctgccgccccactagcgactgcgccgtcgacgatccggcagggcacgtcagcgcgaaacgtcaccgcgttcggggcaccagagcacggacccggcatgccgcgggtctcggacggtcgggcgccatcgacgccggacgaggtcgcggtgtcgagcacgctgggccgaaacctcggcgacgatc

SEQ ID NO: 138 - protein, 20 aa, Mycobacterium tuberculosis
LCVMSNGENDALSSQSSAPA

SEQ ID NO: 139 - DNA, 431 bp, Mycobacterium tuberculosis
  CDS (1)..(6)
  CDS (10)..(429)
tttgcgtgatgtccaatggcgaaaacgacgccttgtcatcgcaatcgtcagcaccggcctagttttcgcgatgacgctcgttctgaccggacttgtgaacgggtttcgggtcgaggccgagcgaaccgtcgattccatgggtgtcgacgcattcgtggtcaaggccggcgcggcaggaccgttcctgggttcgacaccattcgcccaaatcgacctgccccaggttgctcgtgcgcctggcgtcttggctgccgccccactagcgactgcgccgtcgacgatccggcagggcacgtcagcgcgaaacgtcaccgcgttcggggcaccagagcacggacccggcatgccgcgggtctcggacggtcgggcgccatcgacgccggacgaggtcgcggtgtcgagcacgctgggccgaaacctcggcgacgatc

SEQ ID NO: 140 - protein, 140 aa, Mycobacterium tuberculosis
CPMAKTTPCHRNRQHRPSFRDDARSDRTCERVSGRGRANRRFHGCRRIRGQGRRGRTVPGFDTIRPNRPAPGCSCAWRLGCRPTSDCAVDDPAGHVSAKRHRVRGTRARTRHAAGLGRSGAIDAGRGRGVEHAGPKPRRR

SEQ ID NO: 141 - DNA, 430 bp, Mycobacterium tuberculosis
  CDS (1)..(429)
ttgcgtgatgtccaatggcgaaaacgacgccttgtcatcgcaatcgtcagcaccggcctagttttcgcgatgacgctcgttctgaccggacttgtgaacgggtttcgggtcgaggccgagcgaaccgtcgattccatgggtgtcgacgcattcgtggtcaaggccggcgcggcaggaccgttcctgggttcgacaccattcgcccaaatcgacctgccccaggttgctcgtgcgcctggcgtcttggctgccgccccactagcgactgcgccgtcgacgatccggcagggcacgtcagcgcgaaacgtcaccgcgttcggggcaccagagcacggacccggcatgccgcgggtctcggacggtcgggcgccatcgacgccggacgaggtcgcggtgtcgagcacgctgggccgaaacctcggcgacgatc

SEQ ID NO: 142 - protein, 143 aa, Mycobacterium tuberculosis
LRDVQWRKRRLVIAIVSTGLVFAMTLVLTGLVNGFRVEAERTVDSMGVDAFVVKAGAAGPFLGSTPFAQIDLPQVARAPGVLAAAPLATAPSTIRQGTSARNVTAFGAPEHGPGMPRVSDGRAPSTPDEVAVSSTLGRNLGDD

SEQ ID NO: 143 - DNA, 211 bp, Mycobacterium tuberculosis
  CDS (1)..(210)
caggttgctcgtgcgcctggcgtcttggctgccgccccactagcgactgcgccgtcgacgatccggcagggcacgtcagcgcgaaacgtcaccgcgttcggggcaccagagcacggacccggcatgccgcgggtctcggacggtcgggcgccatcgacgccggacgaggtcgcggtgtcgagcacgctgggccgaaacctcggcgacgatc

SEQ ID NO: 144 - protein, 70 aa, Mycobacterium tuberculosis
QVARAPGVLAAAPLATAPSTIRQGTSARNVTAFGAPEHGPGMPRVSDGRAPSTPDEVAVSSTLGRNLGDD

SEQ ID NO: 145 - DNA, 210 bp, Mycobacterium tuberculosis
  CDS (1)..(39)
  CDS (43)..(210)
aggttgctcgtgcgcctggcgtcttggctgccgccccactagcgactgcgccgtcgacgatccggcagggcacgtcagcgcgaaacgtcaccgcgttcggggcaccagagcacggacccggcatgccgcgggtctcggacggtcgggcgccatcgacgccggacgaggtcgcggtgtcgagcacgctgggccgaaacctcggcgacgatc

SEQ ID NO: 146 - protein, 13 aa, Mycobacterium tuberculosis
RLLVRLASWLPPH

SEQ ID NO: 147 - protein, 56 aa, Mycobacterium tuberculosis
RLRRRRSGRARQRETSPRSGHQSTDPACRGSRTVGRHRRRTRSRCRARWAETSATI

SEQ ID NO: 148 - DNA, 212 bp, Mycobacterium tuberculosis
  CDS (1)..(210)
ccaggttgctcgtgcgcctggcgtcttggctgccgccccactagcgactgcgccgtcgacgatccggcagggcacgtcagcgcgaaacgtcaccgcgttcggggcaccagagcacggacccggcatgccgcgggtctcggacggtcgggcgccatcgacgccggacgaggtcgcggtgtcgagcacgctgggccgaaacctcggcgacgatc

SEQ ID NO: 149 - protein, 70 aa, Mycobacterium tuberculosis
PGCSCAWRLGCRPTSDCAVDDPAGHVSAKRHRVRGTRARTRHAAGLGRSGAIDAGRGRGVEHAGPKPRRR

SEQ ID NO: 150 - DNA, 1047 bp, Mycobacterium tuberculosis
  CDS (1)..(1044)
ctttttgcggctttgcgtgatgtccaatggcgaaaacgacgccttgtcatcgcaatcgtcagcaccggcctagttttcgcgatgacgctcgttctgaccggacttgtgaacgggtttcgggtcgaggccgagcgaaccgtcgattccatgggtgtcgacgcattcgtggtcaaggccggcgcggcaggaccgttcctgggttcgacaccattcgcccaaatcgacctgccccaggttgctcgtgcgcctggcgtcttggctgccgccccactagcgactgcgccgtcgacgatccggcagggcacgtcagcgcgaaacgtcaccgcgttcggggcaccagagcacggacccggcatgccgcgggtctcggacggtcgggcgccatcgacgccggacgaggtcgcggtgtcgagcacgctgggccgaaacctcggcgacgatctgcaagtgggtgcgcgcactttgcggatcgtcggcatcgtgcccgagtcaaccgcgctggcaaagattcccaacatcttcctgaccaccgaaggcctacagcagttggcatacaacggacagccgacaatcagttcgatcgggatcgacgggatgccccgacagctcccggacggctatcagaccgtcaatcgagcggatgctgtcagcgatctgatgcgcccgttgaaggtcgcggtggatgcgatcacggttgtggcggtcttgctgtggatcgttgcggcgttgatcgtcggctcggtggtctacctctctgcgttggagcggctgcgtgactttgcggtgttcaaggcgatcggcgtgccgacgcgctcgattctggccgggctggcgctgcaggcggtcgtcgtcgcgctgctcgcggcggtggttggcggcatcctttcgctgctgttggcgccgttgttcccgatgactgtcgtggtacccctgagtgccttcgtggcgctaccggcgatcgcgactgtgatcggtctgctggccagcgtcgcaggactgcggcgcgtggtggcgatcgatccggcactagcgttcggaggtccctag

SEQ ID NO: 151 - protein, 348 aa, Mycobacterium tuberculosis
LFAALRDVQWRKRRLVIAIVSTGLVFAMTLVLTGLVNGFRVEAERTVDSMGVDAFVVKAGAAGPFLGSTPFAQIDLPQVARAPGVLAAAPLATAPSTIRQGTSARNVTAFGAPEHGPGMPRVSDGRAPSTPDEVAVSSTLGRNLGDDLQVGARTLRIVGIVPESTALAKIPNIFLTTEGLQQLAYNGQPTISSIGIDGMPRQLPDGYQTVNRADAVSDLMRPLKVAVDAITVVAVLLWIVAALIVGSVVYLSALERLRDFAVFKAIGVPTRSILAGLALQAVVVALLAAVVGGILSLLLAPLFPMTVVVPLSAFVALPAIATVIGLLASVAGLRRVVAIDPALAFGGP

SEQ ID NO: 152 - DNA, 1269 bp, Mycobacterium tuberculosis
  CDS (4)..(1266)
taggtttcaagaaggcctgtgcaggtttccgcagcctgggccgcggcgccaccgaagagcccgccgaaatgggctaatcgggttcgcttggctcgatcgccgatgatctcgaccgccacgaccgaccccctcacctcggtcgaacctcggcgaaccaacgcggcaacgccagcccatgatcatttgattgggtccacggaagcaggtagcttccgtcgcatgctttttgcggctttgcgtgatgtccaatggcgaaaacgacgccttgtcatcgcaatcgtcagcaccggcctagttttcgcgatgacgctcgttctgaccggacttgtgaacgggtttcgggtcgaggccgagcgaaccgtcgattccatgggtgtcgacgcattcgtggtcaaggccggcgcggcaggaccgttcctgggttcgacaccattcgcccaaatcgacctgccccaggttgctcgtgcgcctggcgtcttggctgccgccccactagcgactgcgccgtcgacgatccggcagggcacgtcagcgcgaaacgtcaccgcgttcggggcaccagagcacggacccggcatgccgcgggtctcggacggtcgggcgccatcgacgccggacgaggtcgcggtgtcgagcacgctgggccgaaacctcggcgacgatctgcaagtgggtgcgcgcactttgcggatcgtcggcatcgtgcccgagtcaaccgcgctggcaaagattcccaacatcttcctgaccaccgaaggcctacagcagttggcatacaacggacagccgacaatcagttcgatcgggatcgacgggatgccccgacagctcccggacggctatcagaccgtcaatcgagcggatgctgtcagcgatctgatgcgcccgttgaaggtcgcggtggatgcgatcacggttgtggcggtcttgctgtggatcgttgcggcgttgatcgtcggctcggtggtctacctctctgcgttggagcggctgcgtgactttgcggtgttcaaggcgatcggcgtgccgacgcgctcgattctggccgggctggcgctgcaggcggtcgtcgtcgcgctgctcgcggcggtggttggcggcatcctttcgctgctgttggcgccgttgttcccgatgactgtcgtggtacccctgagtgccttcgtggcgctaccggcgatcgcgactgtgatcggtctgctggccagcgtcgcaggactgcggcgcgtggtggcgatcgatccggcactagcgttcggaggtccctag

SEQ ID NO: 153 - protein, 421 aa, Mycobacterium tuberculosis
VSRRPVQVSAAWAAAPPKSPPKWANRVRLARSPMISTATTDPLTSVEPRRTNAATPAHDHLIGSTEAGSFRRMLFAALRDVQWRKRRLVIAIVSTGLVFAMTLVLTGLVNGFRVEAERTVDSMGVDAFVVKAGAAGPFLGSTPFAQIDLPQVARAPGVLAAAPLATAPSTIRQGTSARNVTAFGAPEHGPGMPRVSDGRAPSTPDEVAVSSTLGRNLGDDLQVGARTLRIVGIVPESTALAKIPNIFLTTEGLQQLAYNGQPTISSIGIDGMPRQLPDGYQTVNRADAVSDLMRPLKVAVDAITVVAVLLWIVAALIVGSVVYLSALERLRDFAVFKAIGVPTRSILAGLALQAVVVALLAAVVGGILSLLLAPLFPMTVVVPLSAFVALPAIATVIGLLASVAGLRRVVAIDPALAFGGP

SEQ ID NO: 154 - DNA, 1050 bp, Mycobacterium tuberculosis
  CDS (1)..(1047)
atgctcttcgcggccctgcgtgacatgcaatggagaaagcgccgcctggtcatcacgatcatcagcaccgggctgatcttcgggatgacgcttgttttgaccggactcgcgaacggcttccgggtggaggcccggcacaccgtcgattccatgggtgtcgatgtattcgtcgtcagatccggcgctgctggaccttttctgggttcaataccgtttcccgatgttgacctggcccgagtggccgctgaacccggtgtcatggccgcggccccgttgggcagcgtggggacgatcatgaaagaaggcacgtcgacgcgaaacgtcacggtcttcggcgcgcccgagcacggacctggcatgccacgggtctcagagggtcggtcaccgtcgaaaccggacgaagtcgcggcatcgagcacgatgggccgacacctcggtgacactgtcgaggtcggcgcgcgcagattgcgggtcgttggcattgtgccgaattccaccgcgctggccaagatccccaatgtcttcctcacgaccgagggcttacagaaattggcgtacaacgggcagccgaatatcacgtccatcgggatcataggtatgccccgacagctgccggagggttaccagactttcgatcgggtgggcgctgtcaatgatttggtgcgcccattgaaggtcgcagtgaattcgatctcgatcgtggctgttttgctgtggattgtggcggtgctgatcgtcggctcggtggtgtacctttcggctcttgagcggctacgtgacttcgcggtgttcaaggcgattggcacgccaacgcgctcgattatggccgggctcgcattacaggcgctggtcattgcgttgcttgcggcggtggtgggcgtcgtcctggcgcaggtgttggcaccactgtttccgatgattgtcgcggtacccgtcggtgcttacctggcgctaccggtggccgcgatcgtcatcggtctgttcgctagtgttgccggattgaagcgcgtggtgacggtcgatcccgcgcaggcgttcggaggtccctag

SEQ ID NO: 155 - protein, 349 aa, Mycobacterium tuberculosis
MLFAALRDMQWRKRRLVITIISTGLIFGMTLVLTGLANGFRVEARHTVDSMGVDVFVVRSGAAGPFLGSIPFPDVDLARVAAEPGVMAAAPLGSVGTIMKEGTSTRNVTVFGAPEHGPGMPRVSEGRSPSKPDEVAASSTMGRHLGDTVEVGARRLRVVGIVPNSTALAKIPNVFLTTEGLQKLAYNGQPNITSIGIIGMPRQLPEGYQTFDRVGAVNDLVRPLKVAVNSISIVAVLLWIVAVLIVGSVVYLSALERLRDFAVFKAIGTPTRSIMAGLALQALVIALLAAVVGVVLAQVLAPLFPMIVAVPVGAYLALPVAAIVIGLFASVAGLKRVVTVDPAQAFGGP

SEQ ID NO: 156 - DNA, 1062 bp, Mycobacterium tuberculosis
  CDS (4)..(1059)
tagcctctgggaatgctcttcgcggccctgcgtgacatgcaatggagaaagcgccgcctggtcatcacgatcatcagcaccgggctgatcttcgggatgacgcttgttttgaccggactcgcgaacggcttccgggtggaggcccggcacaccgtcgattccatgggtgtcgatgtattcgtcgtcagatccggcgctgctggaccttttctgggttcaataccgtttcccgatgttgacctggcccgagtggccgctgaacccggtgtcatggccgcggccccgttgggcagcgtggggacgatcatgaaagaaggcacgtcgacgcgaaacgtcacggtcttcggcgcgcccgagcacggacctggcatgccacgggtctcagagggtcggtcaccgtcgaaaccggacgaagtcgcggcatcgagcacgatgggccgacacctcggtgacactgtcgaggtcggcgcgcgcagattgcgggtcgttggcattgtgccgaattccaccgcgctggccaagatccccaatgtcttcctcacgaccgagggcttacagaaattggcgtacaacgggcagccgaatatcacgtccatcgggatcataggtatgccccgacagctgccggagggttaccagactttcgatcgggtgggcgctgtcaatgatttggtgcgcccattgaaggtcgcagtgaattcgatctcgatcgtggctgttttgctgtggattgtggcggtgctgatcgtcggctcggtggtgtacctttcggctcttgagcggctacgtgacttcgcggtgttcaaggcgattggcacgccaacgcgctcgattatggccgggctcgcattacaggcgctggtcattgcgttgcttgcggcggtggtgggcgtcgtcctggcgcaggtgttggcaccactgtttccgatgattgtcgcggtacccgtcggtgcttacctggcgctaccggtggccgcgatcgtcatcggtctgttcgctagtgttgccggattgaagcgcgtggtgacggtcgatcccgcgcaggcgttcggaggtccctag

SEQ ID NO: 157 - protein, 352 aa, Mycobacterium tuberculosis
PLGMLFAALRDMQWRKRRLVITIISTGLIFGMTLVLTGLANGFRVEARHTVDSMGVDVFVVRSGAAGPFLGSIPFPDVDLARVAAEPGVMAAAPLGSVGTIMKEGTSTRNVTVFGAPEHGPGMPRVSEGRSPSKPDEVAASSTMGRHLGDTVEVGARRLRVVGIVPNSTALAKIPNVFLTTEGLQKLAYNGQPNITSIGIIGMPRQLPEGYQTFDRVGAVNDLVRPLKVAVNSISIVAVLLWIVAVLIVGSVVYLSALERLRDFAVFKAIGTPTRSIMAGLALQALVIALLAAVVGVVLAQVLAPLFPMIVAVPVGAYLALPVAAIVIGLFASVAGLKRVVTVDPAQAFGGP

SEQ ID NO: 158 - DNA, 320 bp, Mycobacterium tuberculosis
  CDS (1)..(318)
cgaggccgagcgaaccgtcgattccatgggtgtcgacgcattcgtggtcaaggccggcgcggcaggaccgttcctgggttcgacaccattcgcccaaatcgacctgccccaggttgctcgtgcgcctggcgtcttggctgccgccccactagcgactgcgccgtcgacgatccggcagggcacgtcagcgcgaaacgtcaccgcgttcggggcaccagagcacggacccggcatgccgcgggtctcggacggtcgggcgccatcgacgccggacgaggtcgcggtgtcgagcacgctgggccgaaacctcggcgacgatc

SEQ ID NO: 159 - protein, 106 aa, Mycobacterium tuberculosis
RGRANRRFHGCRRIRGQGRRGRTVPGFDTIRPNRPAPGCSCAWRLGCRPTSDCAVDDPAGHVSAKRHRVRGTRARTRHAAGLGRSGAIDAGRGRGVEHAGPKPRRR

SEQ ID NO: 160 - DNA, 319 bp, Mycobacterium tuberculosis
  CDS (1)..(318)
gaggccgagcgaaccgtcgattccatgggtgtcgacgcattcgtggtcaaggccggcgcggcaggaccgttcctgggttcgacaccattcgcccaaatcgacctgcccgaggttgctcgtgcgcctggcgtcttggctgccgccccactagcgactgcgccgtcgacgatccggcagggcacgtcagcgcgaaacgtcaccgcgttcggggcaccagagcacggacccggcatgccgcgggtctcggacggtcgggcgccatcgacgccggacgaggtcgcggtgtcgagcacgctgggccgaaacctcggcgacgatc

SEQ ID NO: 161 - protein, 106 aa, Mycobacterium tuberculosis
EAERTVDSMGVDAFVVKAGAAGPFLGSTPFAQIDLPEVARAPGVLAAAPLATAPSTIRQGTSARNVTAFGAPEHGPGMPRVSDGRAPSTPDEVAVSSTLGRNLGDD

SEQ ID NO: 162 - DNA, 318 bp, Mycobacterium tuberculosis
  CDS (1)..(147)
  CDS (151)..(318)
aggccgagcgaaccgtcgattccatgggtgtcgacgcattcgtggtcaaggccggcgcggcaggaccgttcctgggttcgacaccattcgcccaaatcgacctgccccaggttgctcgtgcgcctggcgtcttggctgccgccccactagcgactgcgccgtcgacgatccggcagggcacgtcagcgcgaaacgtcaccgcgttcggggcaccagagcacggacccggcatgccgcgggtctcggacggtcgggcgccatcgacgccggacgaggtcgcggtgtcgagcacgctgggccgaaacctcggcgacgatc

SEQ ID NO: 163 - protein, 49 aa, Mycobacterium tuberculosis
RPSEPSIPWVSTHSWSRPARQDRSWVRHHSPKSTCPRLLVRLASWLPPH

SEQ ID NO: 164 - protein, 56 aa, Mycobacterium tuberculosis; identical to SEQ ID NO: 147

SEQ ID NO: 165 - DNA, 445 bp, Mycobacterium tuberculosis
  CDS (1)..(249)
  CDS (253)..(279)
  CDS (283)..(444)
ttaacgactcagacggaaacgcttgaaccgcgaggtcgctccggacaccaatttgactcggctctttggcaattgaaggtgagctgcgagcagccgggtgaccgcatcgttggccttgccatcaatcgccggctcgcggacgtagataatcagctcaccgttgggaccgacctcgaccaggggtcctttgtgactgccgggcttgacgcggacgaccacagagtcggtcatcgcctaaggctaccgttctgacctggggctgcgtgggcgccgacgacgtgaggcacgtcatgtctcagcggcccaccgccacctcggtcgccggcagtatgtcagcatgtgcagatgactccacgcagccttgttcgcatcgttggtgtcgtggttgcgacgaccttggcgctggtgagcgcacccgccggcggtcgtgccgcgcatgcggatc

SEQ ID NO: 166 - protein, 83 aa, Mycobacterium tuberculosis
LTTQTETLEPRGRSGHQFDSALWQLKVSCEQPGDRIVGLAINRRLADVDNQLTVGTDLDQGSFVTAGLDADDHRVGHRLRLPF

SEQ ID NO: 167 - protein, 9 aa, Mycobacterium tuberculosis
PGAAWAPTT

SEQ ID NO: 168 - protein, 54 aa, Mycobacterium tuberculosis
GTSCLSGPPPPRSPAVCQHVQMTPRSLVRIVGVVVATTLALVSAPAGGRAAHAD

SEQ ID NO: 169 - DNA, 444 bp, Mycobacterium tuberculosis
  CDS (4)..(72)
  CDS (76)..(78)
  CDS (82)..(141)
  CDS (145)..(189)
  CDS (193)..(234)
  CDS (238)..(345)
  CDS (349)..(405)
  CDS (409)..(444)
taacgactcagacggaaacgcttgaaccgcgaggtcgctccggacaccaatttgactcggctctttggcaattgaaggtgagctgcgagcagccgggtgaccgcatcgttggccttgccatcaatcgccggctcgcggacgtagataatcagctcaccgttgggaccgacctcgaccaggggtcctttgtgactgccgggcttgacgcggacgaccacagagtcggtcatcgcctaaggctaccgttctgacctggggctgcgtgggcgccgacgacgtgaggcacgtcatgtctcagcggcccaccgcgacctcggtcgccggcagtatgtcagcatgtgcagatgactccacgcagccttgttcgcatcgttggtgtcgtggttgcgacgaccttggcgctggtgagcgcacccgccggcggtcgtgccgcgcatgcggatc

SEQ ID NO: 170 - protein, 23 aa, Mycobacterium tuberculosis
RLRRKRLNREVAPDTNLTRLFGN

SEQ ID NO: 171 - protein, 20 aa, Mycobacterium tuberculosis
AASSRVTASLALPSIAGSRT

SEQ ID NO: 172 - protein, 15 aa, Mycobacterium tuberculosis
IISSPLGPTSTRGPL

SEQ ID NO: 173 - protein, 14 aa, Mycobacterium tuberculosis
LPGLTRTTTESVIA

SEQ ID NO: 174 - protein, 36 aa, Mycobacterium tuberculosis
GYRSDLGLRGRRRREARHVSAAHRDLGRRQYVSMCR

SEQ ID NO: 175 - protein, 19 aa, Mycobacterium tuberculosis
LHAALFASLVSWLRRPWRW

SEQ ID NO: 176 - protein, 12 aa, Mycobacterium tuberculosis
AHPPAVVPRMRI

SEQ ID NO: 177 - DNA, 443 bp, Mycobacterium tuberculosis
  CDS (1)..(21)
  CDS (25)..(51)
  CDS (55)..(96)
  CDS (100)..(144)
  CDS (148)..(201)
  CDS (205)..(441)
aacgactcagacggaaacgcttgaaccgcgaggtcgctccggacaccaatttgactcggctctttggcaattgaaggtgagctgcgagcagccgggtgaccgcatcgttggccttgccatcaatcgccggctcgcggacgtagataatcagctcaccgttgggaccgacctcgaccaggggtcctttgtgactgccgggcttgacgcggacgaccacagagtcggtcatcgcctaaggctaccgttctgacctggggctgcgtgggcgccgacgacgtgaggcacgtcatgtctcagcggcccaccgccacctcggtcgccggcagtatgtcagcatgtgcagatgactccacgcagccttgttcgcatcgttggtgtcgtggttgcgacgaccttggcgctggtgagcgcacccgccggcggtcgtgccgcgcatgcggatc

SEQ ID NO: 178 - protein, 7 aa, Mycobacterium tuberculosis
NDSDGNA

SEQ ID NO: 179 - protein, 9 aa, Mycobacterium tuberculosis
TARSLRTPI

SEQ ID NO: 180 - protein, 14 aa, Mycobacterium tuberculosis
LGSLAIEGELRAAG

SEQ ID NO: 181 - protein, 15 aa, Mycobacterium tuberculosis
PHRWPCHQSPARGRR

SEQ ID NO: 182 - protein, 18 aa, Mycobacterium tuberculosis
SAHRWDRPRPGVLCDCRA

SEQ ID NO: 183 - protein, 79 aa, Mycobacterium tuberculosis
RGRPQSRSSPKATVLTWGCVGADDVRHVMSQRPTATSVAGSMSACADDSTQPCSHRWCRGCDDLGAGERTRRRSCRACG

SEQ ID NO: 184 - DNA, 510 bp, Mycobacterium tuberculosis
  CDS (1)..(30)
  CDS (34)..(66)
  CDS (70)..(114)
  CDS (118)..(510)
cccgaagaggtcccccgttttgttaatttttaaaaaatttgtgtcacaaaccggggtaccaaggcataaaacctagtacctggggcggcggattcaacgaaaaccgagtgggggtagtcaggggcgtgcattccgacgaccctgtacgacccgctggtggcaacgccgatgagtgcgccgacgaaggccgagcgacgggctgccggcgctgaccgccgcggaagccgccgagtgcatggtcaccaccgcccgcacccgaccggtacggatcgcgcctcgggttaccgtcgccgtcaacgcgctggacagcatcggtccccgctgggtcaatgcactcatgcagcgccgcaacgaacagctcaacccttgaaccgggtcccggcctgccgaccctcggccgccggcgtgccgctacgtgatagacacagggccatggaaatcctggccagccggatgctacttcggccggcggactatcagcggtcgctgagcttctaccgtgaccagatc

SEQ ID NO: 185 - protein, 10 aa, Mycobacterium tuberculosis
PEEVPRFVNF

SEQ ID NO: 186 - protein, 11 aa, Mycobacterium tuberculosis
KICVTNRGTKA

SEQ ID NO: 187 - protein, 15 aa, Mycobacterium tuberculosis
NLVPGAADSTKTEWG

SEQ ID NO: 188 - protein, 131 aa, Mycobacterium tuberculosis
SGACIPTTLYDPLVATPMSAPTKAERRAAGADRRGSRRVHGHHRPHPTGTDRASGYRRRQRAGQHRSPLGQCTHAAPQRTAQPLNRVPACRPSAAGVPLRDRHRAMEILASRMLLRPADYQRSLSFYRDQI

SEQ ID NO: 189 - DNA, 509 bp, Mycobacterium tuberculosis
  CDS (1)..(72)
  CDS (76)..(168)
  CDS (172)..(366)
  CDS (370)..(486)
  CDS (490)..(507)
ccgaagaggtcccccgttttgttaatttttaaaaaatttgtgtcacaaagcggggtaccaaggcataaaacctagtacctggggcggcggattcaacgaaaaccgagtgggggtagtcaggggcgtgcattccgacgaccctgtacgacccgctggtggcaacgccgatgagtgccccgacgaaggccgagcgacgggctgccggcgctgaccgccgcggaagccgccgagtggatggtcaccaccgcccgcacccgaccggtacggatcgcgcctcgggttaccgtcgccgtcaccgcgctggacagcatcggtccccgctgggtcaatgcactcatgcagcgccgcaacgaacagctcaacccttgaaccgggtcccggcctgccgaccctcggccgccggcgtgccgctacgtgatagacacagggccatggaaatcctggccagccggatgctacttcgcccggcggactatcagcggtcgctgagcttctaccgtgaccagatc

SEQ ID NO: 190 - protein, 24 aa, Mycobacterium tuberculosis
PKRSPVLLIFKKFVSQSGVPRHKT

SEQ ID NO: 191 - protein, 31 aa, Mycobacterium tuberculosis
YLGRRIQRKPSGGSQGRAFRRPCTTRWWQRR

SEQ ID NO: 192 - protein, 65 aa, Mycobacterium tuberculosis
VPRRRPSDGLPALTAAEAAEWMVTTARTRPVRIAPRVTVAVTALDSIGPRWVNALMQRRNEQLNP

SEQ ID NO: 193 - protein, 39 aa, Mycobacterium tuberculosis
TGSRPADPRPPACRYVIDTGPWKSWPAGCYFARRTISGR

SEQ ID NO: 194 - protein, 6 aa, Mycobacterium tuberculosis
ASTVTR

SEQ ID NO: 195 - DNA, 508 bp, Mycobacterium tuberculosis
  CDS (1)..(21)
  CDS (25)..(207)
  CDS (211)..(414)
  CDS (421)..(498)
  CDS (502)..(507)
cgaagaggtcccccgttttgttaatttttaaaaaatttgtgtcacaaagcggggtaccaaggcataaaacctagtacctggggcggcggattcaacgaaaaccgagtgggggtagtcaggggcgtgcattccgacgaccctgtacgacccgctggtggcaacgccgatgagtgcgccgacgaaggccgagcgacgggctgccggcgctgaccgccgcggaagccgccgagtggatggtcaccaccgcccgcacccgaccggtacggatcgcgcctcgggttaccgtcgccgtcaacgcgctggacagcatcggtccccgctgggtcaatgcactcatgcagcgccgcaacgaacagctcaacccttgaaccgggtcccggcctgccgaccctcggccgccggcgtgccgctacgtgatagacacagggccatggaaatcctggccagccggatgctacttcggccggcggactatcagcggtcgctgagcttctaccgtgaccagatc

SEQ ID NO: 196 - protein, 7 aa, Mycobacterium tuberculosis
RRGPPFC

SEQ ID NO: 197 - protein, 61 aa, Mycobacterium tuberculosis
FLKNLCHKAGYQGIKPSTWGGGFNENRVGVVRGVHSDDPVRPAGGNADECADEGRATGCRR

SEQ ID NO: 198 - protein, 68 aa, Mycobacterium tuberculosis
PPRKPPSGWSPPPAPDRYGSRLGLPSPSTRWTASVPAGSMHSCSAATNSSTLEPGPGLPTLGRRRAAT

SEQ ID NO: 199 - protein, 26 aa, Mycobacterium tuberculosis
TQGHGNPGQPDATSAGGLSAVAELLP

SEQ ID NO: 200 - DNA, 225 bp, Mycobacterium tuberculosis
  CDS (1)..(225)
cgtcgccgtcaacgcgctggacagcatcggtccccgctgggtcaatgcactcatgcagcgccgcaacgaacagctcaacccttgaaccgggtcccggcctgccgaccctcggccgccggcgtgccgctacgtgatagacacagggccatggaaatcctggccagccggatgctacttcggccggcggactatcagcggtcgctgagcttctaccgtgaccagatc

SEQ ID NO: 201 - protein, 75 aa, Mycobacterium tuberculosis
RRRQRAGQHRSPLGQCTHAAPQRTAQPLNRVPACRPSAAGVPLRDRHRAMEILASRMLLRPADYQRSLSFYRDQI

SEQ ID NO: 202 - DNA, 224 bp, Mycobacterium tuberculosis
  CDS (1)..(81)
  CDS (85)..(201)
  CDS (205)..(222)
gtcgccgtcaacgcgctggacagcatcggtccccgctgggtcaatgcactcatgcagcgccgcaacgaacagctcaacccttgaaccgggtcccggcctgccgaccctcggccgccggcgtgccgctacgtgatagacacagggccatggaaatcctggccagccggatgctacttcggccggcggactatcagcggtcgctgagcttctaccgtgaccagatc

SEQ ID NO: 203 - protein, 27 aa, Mycobacterium tuberculosis
VAVNALDSIGPRWVNALMQRRNEQLNP

SEQ ID NO: 204 - protein, 39 aa, Mycobacterium tuberculosis
TGSRPADPRPPACRYVIDTGPWKSWPAGCYFGRRTISGR

SEQ ID NO: 205 - protein, 6 aa, Mycobacterium tuberculosis
ASTVTR

SEQ ID NO: 206 - DNA, 223 bp, Mycobacterium tuberculosis
  CDS (1)..(129)
  CDS (136)..(213)
  CDS (217)..(222)
tcgccgtcaacgcgctggacagcatcggtccccgctgggtcaatgcactcatgcagcgccgcaacgaacagctcaacccttgaaccgggtcccggcctgccgaccctcggccgccggcgtgccgctacgtgatagacacagggccatggaaatcctggccagccggatgctacttcggccggcggactatcagcggtcgctgagcttctaccgtgaccagatc

SEQ ID NO: 207 - protein, 43 aa, Mycobacterium tuberculosis
SPSTRWTASVPAGSMHSCSAATNSSTLEPGPGLPTLGRRRAAT

SEQ ID NO: 208 - protein, 26 aa, Mycobacterium tuberculosis
TQGHGNPGQPDATSAGGLSAVAELLP

SEQ ID NO: 209 - DNA, 387 bp, Mycobacterium tuberculosis
  CDS (1)..(384)
atggaaatcctggccagccggatgctacttcggccggcggactatcagcggtcgctgagcttctaccgtgaccagatcgggctggcgattgcccgtgaatacggggccggcacagtgtttttcgccggtcagtcactgctcgaactggccggttacggcgagccggaccattcgcggggaccttttcccggcgcgctgtggctgcaggtgcgcgacctcgaggctacccagaccgagctggtcagccgaggcgtgtcgatcgctcgcgagccccgccgcgaaccgtggggcctgcacgagatgcatgtgaccgacccagacgggatcacactgatattcgtcgaggttcccgagggtcacccgctgcgtacagacacccgggcgtga

SEQ ID NO: 210 - protein, 128 aa, Mycobacterium tuberculosis
MEILASRMLLRPADYQRSLSFYRDQIGLAIAREYGAGTVFFAGQSLLELAGYGEPDHSRGPFPGALWLQVRDLEATQTELVSRGVSIAREPRREPWGLHEMHVTDPDGITLIFVEVPEGHPLRTDTRA

SEQ ID NO: 211 - DNA, 702 bp, Mycobacterium tuberculosis
  CDS (4)..(699)
tagtcagggcgtgcattcgacgacgctgtactacccgctggtggcaactccgatgattgcgccgacgaaggcctacgacgggctgccggcgctgaccgccgcggaagccgccgagtggatggtcaccgccgcccgcacccgaccggtgcggatcgcgcctcgggttgccgtcgccgtcaacgcgctggacagcatcggtccccgctgggtcaatgcactcatgcagcgccgcaacgaacagctcaacccttgaaccgggtcccggcctgccgaccctcggccgccggcgtgccgctacgtgatagacacagggccatggaaatcctggccagccggatgctacttcggccggcggactatcagcggtcgctgagcttctaccgtgaccagatcgggctggcgattgcccgtgaatacggggccggcacagtgtttttcgccggtcagtcactgctcgaactggccggttacggcgagccggaccattcgcggggaccttttcccggcgcgctgtggctgcaggtgcgcgacctcgaggctacccagaccgagctggtcagccgaggcgtgtcgatcgctcgcgagccccgccgcgaaccgtggggcctgcacgagatgcatgtgaccgacccagacgggatcacactgatattcgtcgaggttcccgagggtcacccgctgcgtacagacacccgggcgtga

SEQ ID NO: 212 - protein, 232 aa, Mycobacterium tuberculosis
SGRAFDDAVLPAGGNSDDCADEGLRRAAGADRRGSRRVDGHRRPHPTGADRASGCRRRQRAGQHRSPLGQCTHAAPQRTAQPLNRVPACRPSAAGVPLRDRHRAMEILASRMLLRPADYQRSLSFYRDQIGLAIAREYGAGTVFFAGQSLLELAGYGEPDHSRGPFPGALWLQVRDLEATQTELVSRGVSIAREPRREPWGLHEMHVTDPDGITLIFVEVPEGHPLRTDTRA

SEQ ID NO: 213 - DNA, 316 bp, Mycobacterium tuberculosis
  CDS (1)..(87)
  CDS (94)..(213)
  CDS (217)..(315)
gaccgaagggatttcgcgactaactcggcctgtaaggcaacgcgaggtcttcatgccgaggacgtagacaggaagagacagggaagctgatgacgtcgcgtaccggaccgccattctgtcgagtctttccgagttcagcaacaatcgacacagaagcggggaccagaccgggaggacgacgcggcccgggccgcttcgggccgagtgtctgagtaagaccagagtcacgggtccgtgtgtgacaaccgcgcggaattcaatcggatggcgggcgggaccggattgcgccggtcaccgaggaacctccggagtgatc

SEQ ID NO: 214 - protein, 29 aa, Mycobacterium tuberculosis
DRRDFATNSACKATRGLHAEDVDRKRQGS

SEQ ID NO: 215 - protein, 40 aa, Mycobacterium tuberculosis
RRVPDRHSVESFRVQQQSTQKRGPDREDDAARAASGRVSE

SEQ ID NO: 216 - protein, 33 aa, Mycobacterium tuberculosis
DQSHGSVCDNRAEFNRMAGGTGLRRSPRNLRSD

SEQ ID NO: 217 - DNA, 315 bp, Mycobacterium tuberculosis
  CDS (1)..(63)
  CDS (67)..(315)
accgaagggatttcgcgactaactcggcctgtaaggcaacgcgaggtcttcatgccgaggacgtagacaggaagagacagggaagctgatgacgtcgcgtaccggaccgccattctgtcgagtctttccgagttcagcaacaatcgacacagaagcggggaccagaccgggaggacgacgcggcccgggccgcttcgggccgagtgtctgagtaagaccagagtcacgggtccgtgtgtgacaaccgcgcggaattcaatcggatggcgggcgggaccggattgcgccggtcaccgaggaacctccggagtgatc

SEQ ID NO: 218 - protein, 21 aa, Mycobacterium tuberculosis
TEGISRLTRPVRQREVFMPRT

SEQ ID NO: 219 - protein, 83 aa, Mycobacterium tuberculosis
TGRDREADDVAYRTAILSSLSEFSNNRHRSGDQTGRTTRPGPLRAECLSKTRVTGPCVTTARNSIGWRAGPDCAGHRGTSGVI

SEQ ID NO: 220 - DNA, 314 bp, Mycobacterium tuberculosis
  CDS (1)..(18)
  CDS (22)..(30)
  CDS (34)..(207)
  CDS (211)..(237)
  CDS (241)..(309)
ccgaagggatttcgcgactaactcggcctgtaaggcaacgcgaggtcttcatgccgaggacgtagacaggaagagacagggaagctgatgacgtcgcgtaccggaccgccattctgtcgagtctttccgagttcagcaacaatcgacacagaagcggggaccagaccgggaggacgacgcggcccgggccgcttcgggccgagtgtctgagtaagaccagagtcacgggtccgtgtgtgacaaccgcgcggaattcaatcggatggcgggcgggaccggattgcgccggtcaccgaggaacctccggagtgatc

SEQ ID NO: 221 - protein, 6 aa, Mycobacterium tuberculosis
PKGFRD

SEQ ID NO: 222 - protein, 58 aa, Mycobacterium tuberculosis
GNARSSCRGRRQEETGKLMTSRTGPPFCRVFPSSATIDTEAGTRPGGRRGPGRFGPSV

SEQ ID NO: 223 - protein, 9 aa, Mycobacterium tuberculosis
VRPESRVRV

SEQ ID NO: 224 - protein, 23 aa, Mycobacterium tuberculosis
QPRGIQSDGGRDRIAPVTEEPPE

SEQ ID NO: 225 - DNA, 703 bp, Mycobacterium tuberculosis
  CDS (1)..(48)
  CDS (52)..(102)
  CDS (106)..(507)
  CDS (511)..(537)
  CDS (541)..(702)
gggatttcgttgcccgatggattgtttgtacggtttgggaaaaacacttgaagtcctttttattggcaatgctggaaatggacattccaatattgcgcgaattaaccgaacacggtgaggggggggcaagcgtttgtaccggggccagcaagcgccgccgaccggttgaccgaagccagcatgttgttgtgtcagcgcgggcttggtctcgatgtcccggccttggctggacccgcttcttcaaaacaggttgaacttaacgactcaagaacggaaacgcttgaaccgcgacgtcgctccggacaccaatttgactcggctctttggcaattgaaggtgagctgcgagcagccgggtgaccgcatcgttggccttgccatcaatcgccggctcgcggacgtagataatcagctcaccgttgggaccgacctcgaccaggggtcctttgtgactgccgggcttgacgcggacgaccacagagtcggtcatcgcctaaggctaccgttctgacctggggctgcgtgggcgccgacgacgtgaggcacgtcatgtctcagcggcccaccgccacctcggtcgccggcagtatgtcagcatgtgcagatgactccacgcagccttgttcgcatcgttggtgtcgtggttgcgacgaccttggcgctggtgagcgcacccgccggcggtcgtgccgcgcatgcggatc

SEQ ID NO: 226 - protein, 16 aa, Mycobacterium tuberculosis
GISLPDGLFVRFGKNT

SEQ ID NO: 227 - protein, 17 aa, Mycobacterium tuberculosis
SPFYWQCWKWTFQYCAN

SEQ ID NO: 228 - DNA, 702 bp, Mycobacterium tuberculosis
  CDS (1)..(114)
  CDS (118)..(165)
  CDS (169)..(330)
  CDS (334)..(336)
  CDS (340)..(399)
  CDS (403)..(447)
  CDS (451)..(492)
  CDS (496)..(503)
  CDS (507)..(663)
  CDS (667)..(702)
ggatttcgttgcccgatggattgtttgtacggtttgggaaaaacacttgaagtcctttttattggcaatgctggaaatggacattccaatattgcgcgaattaaccgaacacggtgaggggggggcaagcgtttgtaccggggccagcaagcgccgccgaccggttgaccgaagccagcatgttgttgtgtcagcgcgggcttggtctcgatgtcccggccttggctggacccgcttcttcaaaacaggttgaacttaacgactcaagaacggaaacgcttgaaccgcgacgtcgctccggacaccaatttgactcggctctttggcaattgaaggtgagctgcgagcagccgggtgaccgcatcgttggccttgccatcaatcgccggctcgcggacgtagataatcagctcaccgttgggaccgacctcgaccaggggtcctttgtgactgccgggcttgacgcggacgaccacagagtcggtcatcgcctaaggctaccgttctgacctggggctgcgtgggcgccgacgacgtgaggcacgtcatgtctcagcggcccaccgccacctcggtcgccggcagtatgtcagcatgtgcagatgactccacgcagccttgttcgcatcgttggtgtcgtggttgcgacgaccttggcgctggtgagcgcacccgccggcggtcgtgccgcgcatgcggatc

SEQ ID NO: 229 - protein, 38 aa, Mycobacterium tuberculosis
GFRCPMDCLYGLGKTLEVLFIGNAGNGHSNIARINRTR

SEQ ID NO: 230 - protein, 16 aa, Mycobacterium tuberculosis
GGGKRLYRGQQAPPTG

SEQ ID NO: 231 - protein, 54 aa, Mycobacterium tuberculosis
PKPACCCVSAGLVSMSRPWLDPLLQNRLNLTTQERKRLNRDVAPDTNLTRLFGN

SEQ ID NO: 232 - protein, 20 aa, Mycobacterium tuberculosis
AASSRVTASLALPSIAGSRT

SEQ ID NO: 233 - protein, 15 aa, Mycobacterium tuberculosis
IISSPLGPTSTRGPL

SEQ ID NO: 234 - protein, 14 aa, Mycobacterium tuberculosis
LPGLTRTTTESVIA

SEQ ID NO: 235 - protein, 36 aa, Mycobacterium tuberculosis
GYRSDLGLRGRRRREARHVSAAHRHLGRRQYVSMCR

SEQ ID NO: 236 - protein, 19 aa, Mycobacterium tuberculosis
LHAALFASLVSWLRRPWRW

SEQ ID NO: 237 - protein, 12 aa, Mycobacterium tuberculosis
AHPPAVVPRMRI

SEQ ID NO: 238 - DNA, 701 bp, Mycobacterium tuberculosis
  CDS (1)..(249)
  CDS (253)..(255)
  CDS (259)..(279)
  CDS (283)..(309)
  CDS (313)..(354)
  CDS (358)..(402)
  CDS (406)..(459)
  CDS (463)..(699)
gatttcgttgcccgatggattgtttgtacggtttgggaaaaacacttgaagtcctttttattggcaatgctggaaatggacattccaatattgcgcgaattaaccgaacacggtgaggggggggcaagcgtttgtaccggggccagcaagcgccgccgaccggttgaccgaagccagcatgttgttgtgtcagcgcgggcttggtctcgatgtcccggccttggctggacccgcttcttcaaaacaggttgaacttaacgactcaagaacggaaacgcttgaaccgcgacgtcgctccggacaccaatttgactcggctctttggcaattgaaggtgagctgcgagcagccgggtgaccgcatcgttggccttgccatcaatcgccggctcgcggacgtagataatcagctcaccgttgggaccgacctcgaccaggggtcctttgtgactgccgggcttgacgcggacgaccacagagtcggtcatcgcctaaggctaccgttctgacctggggctgcgtgggcgccgacgacgtgaggcacgtcatgtctcagcggcccaccgccacctcggtcgccggcagtatgtcagcatgtgcagatgactccacgcagccttgttcgcatcgttggtgtcgtggttgcgacgaccttggcgctggtgagcgcacccgccggcggtcgtgccgcgcatgcggatc

SEQ ID NO: 239 - protein, 83 aa, Mycobacterium tuberculosis
DFVARWIVCTVWEKHLKSFLLAMLEMDIPILRELTEHGEGGASVCTGASKRRRPVDRSQHVVVSARAWSRCPGLGWTRFFKTG

SEQ ID NO: 240 - protein, 7 aa, Mycobacterium tuberculosis
RLKNGNA

SEQ ID NO: 241 - protein, 9 aa, Mycobacterium tuberculosis
TATSLRTPI

SEQ ID NO: 242 - protein, 14 aa, Mycobacterium tuberculosis
LGSLAIEGELRAAG

SEQ ID NO: 243 - protein, 15 aa, Mycobacterium tuberculosis
PHRWPCHQSPARGRR

SEQ ID NO: 244 - protein, 18 aa, Mycobacterium tuberculosis
SAHRWDRPRPGVLCDCRA

SEQ ID NO: 245 - protein, 79 aa, Mycobacterium tuberculosis; identical to SEQ ID NO: 183

SEQ ID NO: 246 - DNA, 265 bp, Mycobacterium tuberculosis
  CDS (1)..(69)
  CDS (73)..(99)
  CDS (103)..(264)
gggtcctttgtgactgccgggcttgacgcggacgaccacagagtcggtcatcgcctaaggctaccgttctgacctggggctgcgtgggcgccgacgacgtgaggcacgtcatgtctcagcggcccaccgccacctcggtcgccggcagtatgtcagcatgtgcagatgactccacgcagccttgttcgcatcgttggtgtcgtggttgcgacgaccttggcgctggtgagcgcacccgccggcggtcgtgccgcgcatgcggatc

SEQ ID NO: 247 - protein, 23 aa, Mycobacterium tuberculosis
GSFVTAGLDADDHRVGHRLRLPF

SEQ ID NO: 248 - protein, 9 aa, Mycobacterium tuberculosis
PGAAWAPTT

SEQ ID NO: 249 - protein, 54 aa, Mycobacterium tuberculosis; identical to SEQ ID NO: 168

SEQ ID NO: 250 - DNA, 264 bp, Mycobacterium tuberculosis
  CDS (1)..(9)
  CDS (13)..(54)
  CDS (58)..(165)
  CDS (169)..(225)
  CDS (229)..(264)
ggtcctttgtgactgccgggcttgacgcggacgaccacagagtcggtcatcgcctaaggctaccgttctgacctggggctgcgtgggcgccgacgacgtgaggcacgtcatgtctcagcggcccaccgccacctcggtcgccggcagtatgtcagcatgtgcagatgactccacgcagccttgttcgcatcgttggtgtcgtggttgcgacgaccttggcgctggtgagcgcacccgccggcggtcgtgccgcgcatgcggatc

SEQ ID NO: 251 - protein, 14 aa, Mycobacterium tuberculosis
LPGLTRTTTESVIA

SEQ ID NO: 252 - protein, 36 aa, Mycobacterium tuberculosis; identical to SEQ ID NO: 235

SEQ ID NO: 253 - protein, 19 aa, Mycobacterium tuberculosis
LHAALFASLVSWLRRPWRW

SEQ ID NO: 254 - protein, 12 aa, Mycobacterium tuberculosis
AHPPAVVPRMRI

SEQ ID NO: 255 - DNA, 263 bp, Mycobacterium tuberculosis
  CDS (1)..(21)
  CDS (25)..(261)
gtcctttgtgactgccgggcttgacgcggacgaccacagagtcggtcatcgcctaaggctaccgttctgacctggggctgcgtgggcgccgacgacgtgaggcacgtcatgtctcagcggcccaccgccacctcggtcgccggcagtatgtcagcatgtgcagatgactccacgcagccttgttcgcatcgttggtgtcgtggttgcgacgaccttggcgctggtgagcgcacccgccggcggtcgtgccgcgcatgcggatc

SEQ ID NO: 256 - protein, 7 aa, Mycobacterium tuberculosis
VLCDCRA

SEQ ID NO: 257 - protein, 79 aa, Mycobacterium tuberculosis; identical to SEQ ID NO: 183

SEQ ID NO: 258 - DNA, 654 bp, Mycobacterium tuberculosis
  CDS (1)..(651)
atgactccacgcagccttgttcgcatcgttggtgtcgtggttgcgacgaccttggcgctggtgagcgcacccgccggcggtcgtgccgcgcatgcggatccgtgttcggacatcgcggtcgttttcgctcgcggcacgcatcaggcttctggtcttggcgacgtcggtgaggcgttcgtcgactcgcttacctcgcaagttggcgggcggtcgattggggtctacgcggtgaactacccagcaagcgacgactaccgcgcgagcgcgtcaaacggttccgatgatgcgagcgcccacatccagcgcaccgtcgccagctgcccgaacaccaggattgtgcttggtggctattcgcagggtgcgacggtcatcgatttgtccacctcggcgatgccgcccgcggtggcagatcatgtcgccgctgtcgcccttttcggcgagccatccagtggtttctccagcatgttgtggggcggcgggtcgttgccgacaatcggtccgctgtatagctctaagaccataaacttgtgtgctcccgacgatccaatatgcaccggaggcggcaatattatggcgcatgtttcgtatgttcagtcggggatgacaagccaggcggcgacattcgcggcgaacaggctcgatcacgccggatga

SEQ ID NO: 259 - protein, 217 aa, Mycobacterium tuberculosis
MTPRSLVRIVGVVVATTLALVSAPAGGRAAHADPCSDIAVVFARGTHQASGLGDVGEAFVDSLTSQVGGRSIGVYAVNYPASDDYRASASNGSDDASAHIQRTVASCPNTRIVLGGYSQGATVIDLSTSAMPPAVADHVAAVALFGEPSSGFSSMLWGGGSLPTIGPLYSSKTINLCAPDDPICTGGGNIMAHVSYVQSGMTSQAATFAANRLDHAG

SEQ ID NO: 260 - DNA, 720 bp, Mycobacterium tuberculosis
  CDS (4)..(717)
tgaggcacgtcatgtctcagcggcccaccgccacctcggtcgccggcagtatgtcagcatgtgcagatgactccacgcagccttgttcgcatcgttggtgtcgtggttgcgacgaccttggcgctggtgagcgcacccgccggcggtcgtgccgcgcatgcggatccgtgttcggacatcgcggtcgttttcgctcgcggcacgcatcaggcttctggtcttggcgacgtcggtgaggcgttcgtcgactcgcttacctcgcaagttggcgggcggtcgattggggtctacgcggtgaactacccagcaagcgacgactaccgcgcgagcgcgtcaaacggttccgatgatgcgagcgcccacatccagcgcaccgtcgccagctgcccgaacaccaggattgtgcttggtggctattcgcagggtgcgacggtcatcgatttgtccacctcggcgatgccgcccgcggtggcagatcatgtcgccgctgtcgcccttttcggcgagccatccagtggtttctccagcatgttgtggggcggcgggtcgttgccgacaatcggtccgctgtatagctctaagaccataaacttgtgtgctcccgacgatccaatatgcaccggaggcggcaatattatggcgcatgtttcgtatgttcagtcggggatgacaagccaggcggcgacattcgcggcgaacaggctcgatcacgccggatga

SEQ ID NO: 261 - protein, 238 aa, Mycobacterium tuberculosis
GTSCLSGPPPPRSPAVCQHVQMTPRSLVRIVGVVVATTLALVSAPAGGRAAHADPCSDIAVVFARGTHQASGLGDVGEAFVDSLTSQVGGRSIGVYAVNYPASDDYRASASNGSDDASAHIQRTVASCPNTRIVLGGYSQGATVIDLSTSAMPPAVADHVAAVALFGEPSSGFSSMLWGGGSLPTIGPLYSSKTINLCAPDDPICTGGGNIMAHVSYVQSGMTSQAATFAANRLDHAG

SEQ ID NO: 262 - DNA, 361 bp, Mycobacterium tuberculosis
  CDS (1)..(96)
  CDS (100)..(165)
  CDS (169)..(198)
  CDS (202)..(306)
  CDS (310)..(312)
  CDS (316)..(360)
ccaccggggctggaggggcgaatgtgcgccgaacgccgtcggccaacttggccgctgagggcggctgatcccctggcccgagacggggcaagccaatagcggctccatcgggctttgctggtagcggttcggcgggaaccgagcgccgacgttgtcggtgcccggtgatatattgggtcagacgggtatggcggcgactgaggtgatctgcgacacgccgccgcggtgctcgagccaggcttacgaccagggaatttcgaaaatgttattcagaacatcttgtatctcttcctccgtgccaccccctaggtgtagtgttttcgagtaccggcagatcccagttcaccagtctcaccagatc

SEQ ID NO: 263 - protein, 32 aa, Mycobacterium tuberculosis
PPGLEGRMCAERRRPTWPLRAADPLARDGASQ

SEQ ID NO: 264 - protein, 22 aa, Mycobacterium tuberculosis
RLHRALLVAVRREPSADVVGAR

SEQ ID NO: 265 - protein, 10 aa, Mycobacterium tuberculosis
YIGSDGYGGD

SEQ ID NO: 266 - protein, 35 aa, Mycobacterium tuberculosis
GDLRHAAAVLEPGLRPGNFENVIQNILYLFLRATP

SEQ ID NO: 267 - protein, 15 aa, Mycobacterium tuberculosis
CFRVPADPSSPVSPD

SEQ ID NO: 268 - DNA, 360 bp, Mycobacterium tuberculosis
  CDS (1)..(54)
  CDS (58)..(120)
  CDS (124)..(360)
caccggggctggaggggcgaatgtgcgccgaacgccgtcggccaacttggccgctgagggcggctgatcccctggcccgagacggggcaagccaatagcggctccatcgggctttgctggtagcggttcggcgggaaccgagcgccgacgttgtcggtgcccggtgatatattgggtcagacgggtatggcggcgactgaggtgatctgcgacacgccgccgcggtgctcgagccaggcttacgaccagggaatttcgaaaatgttattcagaacatcttgtatctcttcctccgtgccaccccctaggtgtagtgttttcgagtaccggcagatcccagttcaccagtctcaccagatc

SEQ ID NO: 269 - protein, 18 aa, Mycobacterium tuberculosis
HRGWRGECAPNAVGQLGR

SEQ ID NO: 270 - protein, 21 aa, Mycobacterium tuberculosis
GRLIPWPETGQANSGSIGLCW

SEQ ID NO: 271 - protein, 79 aa, Mycobacterium tuberculosis
RFGGNRAPTLSVPGDILGQTGMAATEVICDTPPRCSSQAYDQGISKMLFRTSCISSSVPPPRCSVFEYRQIPVHQSHQI

SEQ ID NO: 272 - protein, 54 aa, Mycobacterium tuberculosis
TGFGSRPSEPSIPWVSTHSWSRPARQDRSWVRHHSPKSTCPRLLVRLASWLPPH

SEQ ID NO: 273 - protein, 56 aa, Mycobacterium tuberculosis; identical to SEQ ID NO: 147

SEQ ID NO: 274 - DNA, 359 bp, Mycobacterium tuberculosis
  CDS (1)..(63)
  CDS (67)..(201)
  CDS (205)..(357)
accggggctggaggggcgaatgtgcgccgaacgccgtcggccaacttggccgctgagggcggctgatcccctggcccgagacggggcaagccaatagcggctccatcgggctttgctggtagcggttcggcgggaaccgagcgccgacgttgtcggtgcccggtgatatattgggtcagacgggtatggcggcgactgaggtgatctgcgacacgccgccgcggtgctcgagccaggcttacgaccagggaatttcgaaaatgttattcagaacatcttgtatctcttcctccgtgccaccccctaggtgtagtgttttcgagtaccggcagatcccagttcaccagtctcaccagatc

SEQ ID NO: 275 - protein, 21 aa, Mycobacterium tuberculosis
TGAGGANVRRTPSANLAAEGG

SEQ ID NO: 276 - protein, 45 aa, Mycobacterium tuberculosis
SPGPRRGKPIAAPSGFAGSGSAGTERRRCRCPVIYWVRRVWRRLR

SEQ ID NO: 277 - protein, 51 aa, Mycobacterium tuberculosis
SATRRRGARARLTTREFRKCYSEHLVSLPPCHPLGVVFSSTGRSQFTSLTR

SEQ ID NO: 278 - DNA, 46 bp, Mycobacterium tuberculosis
  CDS (1)..(45)
ttttcgagtaccggcagatcccaggttcaccaggtctcaccagatc

SEQ ID NO: 279 - protein, 15 aa, Mycobacterium tuberculosis
FSSTGRSQVHQVSPD

SEQ ID NO: 280 - DNA, 48 bp, Mycobacterium tuberculosis
  CDS (1)..(48)
tgttttcgagtaccggcagatcccaggttcaccaggtctcaccagatc

SEQ ID NO: 281 - protein, 16 aa, Mycobacterium tuberculosis
CFRVPADPRFTRSHQI

SEQ ID NO: 282 - DNA, 47 bp, Mycobacterium tuberculosis
  CDS (1)..(45)
gttttcgagtaccggcagatcccaggttcaccaggtctcaccagatc

SEQ ID NO: 283 - protein, 15 aa, Mycobacterium tuberculosis
VFEYRQIPGSPGLTR

SEQ ID NO: 284 - DNA, 435 bp, Mycobacterium tuberculosis
  CDS (4)..(432)
tagcggttcggcgggaagctagcggcgacgttgtcggtggccggtgatatattgggtcagacgggtatggcggcggctgaggtgatctgcgacacgccgccgcggtgctcgagccaggcttacgaccagggaatttcgaaaatgttattcagaacatcttgtatctcttctccgtgccaccccctaggtgtagtgttttcgagtaccggcagatcccaggttcaccaggtctcaccagatccacggggcgcgatgaacttcccggcatcggcatcgccaggtcgacggacgtggtcgcgctatgacgggaatctggagccttgtcgggccgctcaacatatcgaagatgcactacttgagtcgttgccagatcctgtcagattcccgatttccgcaaaggagcggtacgcccatgaccgtgaccgtttacactaa

SEQ ID NO: 285 - protein, 143 aa, Mycobacterium tuberculosis
RFGGKLAATLSVAGDILGQTGMAAAEVICDTPPRCSSQAYDQGISKMLFRTSCISSPCHPLGVVFSSTGRSQVHQVSPDPRGAMNFPASASPGRRTWSRYDGNLEPCRAAQHIEDALLESLPDPVRFPISAKERYAHDRDRLH

SEQ ID NO: 286 - DNA, 555 bp, Mycobacterium tuberculosis
  CDS (1)..(552)
gtgtcagataccaagtccgacatcaaaatcttggccttagtgggaagcctgcgcgcggcgtcgttcaaccgccagatcgccgagctggctgccaaggtcgctccggacggcgtcaccgtcaccatgttcgaggggctgggggacctgccgttctacaacgaagacatcgacacagcgacggaggtgccggcgccggtgagcgcgttgcgggaggccgcgtctgacgcgcacgctgccttggtggtcacgccggaatacaacggcagcattccggccgtgatcaagaacgcgatcgactggctgtccaggccattcggcgatggcgcgttgaaggacaagccgttggccgtgatcggcggctccatgggccgctacggcggggtatgggcgcacgacgagactcgcaagtcgttcagcatcgctggcacgcgggtggtcgatgcgatcaaactgtcggtgccgttccaaactctgggcaagtcggtcgcggacgacgccgggctggcggcgaatgtgcgcgacgccgtcggcaacttggccgctgaggtcggctga

SEQ ID NO: 287 - protein, 184 aa, Mycobacterium tuberculosis
VSDTKSDIKILALVGSLRAASFNRQIAELAAKVAPDGVTVTMFEGLGDLPFYNEDIDTATEVPAPVSALREAASDAHAALVVTPEYNGSIPAVIKNAIDWLSRPFGDGALKDKPLAVIGGSMGRYGGVWAHDETRKSFSIAGTRVVDAIKLSVPFQTLGKSVADDAGLAANVRDAVGNLAAEVG

SEQ ID NO: 288 - DNA, 636 bp, Mycobacterium tuberculosis
  CDS (4)..(633)
taacgcgatcggaataaatcggaccatggtccggttggctcgtgcaaggacgtggaccaacaagcggaaaggaacgtagcagtgtcagataccaagtccgacatcaaaatcttggccttagtgggaagcctgcgcgcggcgtcgttcaaccgccagatcgccgagctggctgccaaggtcgctccggacggcgtcaccgtcaccatgttcgaggggctgggggacctgccgttctacaacgaagacatcgacacagcgacggaggtgccggcgccggtgagcgcgttgcgggaggccgcgtctgacgcgcacgctgccttggtggtcacgccggaatacaacggcagcattccggccgtgatcaagaacgcgatcgactggctgtccaggccattcggcgatggcgcgttgaaggacaagccgttggccgtgatcggcggctccatgggccgctacggcggggtatgggcgcacgacgagactcgcaagtcgttcagcatcgctggcacgcgggtggtcgatgcgatcaaactgtcggtgccgttccaaactctgggcaagtcggtcgcggacgacgccgggctggcggcgaatgtgcgcgacgccgtcggcaacttggccgctgaggtcggctga

SEQ ID NO: 289 - protein, 210 aa, Mycobacterium tuberculosis
RDRNKSDHGPVGSCKDVDQQAERNVAVSDTKSDIKILALVGSLRAASFNRQIAELAAKVAPDGVTVTMFEGLGDLPFYNEDIDTATEVPAPVSALREAASDAHAALVVTPEYNGSIPAVIKNAIDWLSRPFGDGALKDKPLAVIGGSMGRYGGVWAHDETRKSFSIAGTRVVDAIKLSVPFQTLGKSVADDAGLAANVRDAVGNLAAEVG

SEQ ID NO: 290 - DNA, 1121 bp, Mycobacterium tuberculosis
  CDS (4)..(705)
  CDS (709)..(768)
  CDS (772)..(870)
  CDS (874)..(876)
  CDS (880)..(939)
  CDS (943)..(1119)
taacgcgatcggaataaatcggaccatggtccggttggctcgtgcaaggacgtggaccaacaagcggaaaggaacgtagcagtgtcagataccaagtccgacatcaaaatcttggccttagtgggaagcctgcgcgcggcgtcgttcaaccgccagatcgccgagctggctgccaaggtcgctccggacggcgtcaccgtcaccatgttcgaggggctgggggacctgccgttctacaacgaagacatcgacacagcgacggaggtgccggcgccggtgagcgcgttgcgggaggccgcgtctgacgcgcacgctgccttggtggtcacgccggaatacaacggcagcattccggccgtgatcaagaacgcgatcgactggctgtccaggccattcggcgatggcgcgttgaaggacaagccgttggccgtgatcggcggctccatgggccgctacggcggggtatgggcgcacgacgagactcgcaagtcgttcagcatcgctggcacgcgggtggtcgatgcgatcaaactgtcggtgccgttccaaactctgggcaagtcggtcgcggacgacgccgggctggcggcgaatgtgcgcgacgccgtcggcaacttggccgctgaggtcggctgatccctgggccgaggcgggtcagccaatagcggctccatcggctttgctggtagcggttcggcgggaagctagcggcgacgttgtcggtggccggtgatatattgggtcagacgggtatggcggcggctgaggtgatctgcgacacgccgccgcggtgctcgagccaggcttacgaccagggaatttcgaaaatgttattcagaacatcttgtatctcttctccgtgccaccccctaggtgtagtgttttcgagtaccggcagatcccaggttcaccaggtctcaccagatccacggggcgcgatgaacttcccggcatcggcatcgccaggtcgacggacgtggtcgcgctatgacgggaatctggagccttgtcgggccgctcaacatatcgaagatgcactacttgagtcgttgccagatcctgtcagattcccgatttccgcaaaggagcggtacgcccatgaccgtgaccgtttacactaa

SEQ ID NO: 291 - protein, 210 aa, Mycobacterium tuberculosis; identical to SEQ ID NO: 289

SEQ ID NO: 292 - protein, 23 aa, Mycobacterium tuberculosis
SLGRGGSANSGSIGFAGSGSAGS

SEQ ID NO: 293 - protein, 20 aa, Mycobacterium tuberculosis
RRRCRWPVIYWVRRVWRRLR

SEQ ID NO: 294 - protein, 33 aa, Mycobacterium tuberculosis; identical to SEQ ID NO: 126

SEQ ID NO: 295 - protein, 20 aa, Mycobacterium tuberculosis
CFRVPADPRFTRSHQIHGAR

SEQ ID NO: 296 - protein, 59 aa, Mycobacterium tuberculosis
TSRHRHRQVDGRGRAMTGIWSLVGPLNISKMHYLSRCQILSDSRFPQRSGTPMTVTVYT

SEQ ID NO: 297 - DNA, 1121 bp, Mycobacterium tuberculosis; identical to SEQ ID NO: 290
  CDS (2)..(76)
  CDS (80)..(118)
  CDS (122)..(277)
  CDS (281)..(358)
  CDS (362)..(409)
  CDS (413)..(730)
  CDS (734)..(763)
  CDS (767)..(988)
  CDS (992)..(1042)
  CDS (1046)..(1099)
  CDS (1103)..(1105)
  CDS (1108)..(1120)

SEQ ID NO: 298 - protein, 25 aa, Mycobacterium tuberculosis
NAIGINRTMVRLARARTWTNKRKGT

SEQ ID NO: 299 - protein, 13 aa, Mycobacterium tuberculosis
QCQIPSPTSKSWP

SEQ ID NO: 300 - protein, 52 aa, Mycobacterium tuberculosis
WEACARRRSTARSPSWLPRSLRTASPSPCSRGWGTCRSTTKTSTQRRRCRRR

SEQ ID NO: 301 - protein, 26 aa, Mycobacterium tuberculosis
ARCGRPRLTRTLPWWSRRNTTAAFRP

SEQ ID NO: 302 - protein, 16 aa, Mycobacterium tuberculosis
SRTRSTGCPGHSAMAR

SEQ ID NO: 303 - protein, 6 aa, Mycobacterium tuberculosis
RTSRWP

SEQ ID NO: 304 - protein, 99 aa, Mycobacterium tuberculosis
SAAPWAATAGYGRTTRLASRSASLARGWSMRSNCRCRSKLWASRSRTTPGWRRMCATPSATWPLRSADPWAEAGQPIAAPSALLVAVRREASGDVVGGR

SEQ ID NO: 305 - protein, 10 aa, Mycobacterium tuberculosis
YIGSDGYGGG

SEQ ID NO: 306 - protein, 74 aa, Mycobacterium tuberculosis
GDLRHAAAVLEPGLRPGNFENVIQNILYLFSVPPPRCSVFEYRQIPGSPGLTRSTGRDELPGIGIARSTDVVAL

SEQ ID NO: 307 - protein, 17 aa, Mycobacterium tuberculosis
RESGALSGRSTYRRCTT

SEQ ID NO: 308 - protein, 18 aa, Mycobacterium tuberculosis
VVARSCQIPDFRKGAVRP

SEQ ID NO: 309 - protein, 4 aa, Mycobacterium tuberculosis
PFTL

SEQ ID NO: 310 - DNA, 1121 bp, Mycobacterium tuberculosis; identical to SEQ ID NO: 290
  CDS (3)..(14)
  CDS (18)..(302)
  CDS (306)..(623)
  CDS (627)..(662)
  CDS (666)..(686)
  CDS (690)..(1118)

SEQ ID NO: 311 - protein, 4 aa, Mycobacterium tuberculosis
TRSE

SEQ ID NO: 312 - protein, 95 aa, Mycobacterium tuberculosis
IGPWSGWLVQGRGPTSGKERSSVRYQVRHQNLGLSGKPARGVVQPPDRRAGCQGRSGRRHRHHVRGAGGPAVLQRRHRHSDGGAGAGERVAGGRV

SEQ ID NO: 313 - protein, 106 aa, Mycobacterium tuberculosis
RARCLGGHAGIQRQHSGRDQERDRLAVQAIRRWRVEGQAVGRDRRLHGPLRRGMGARRDSQVVQHRWHAGGRCDQTVGAVPNSGQVGRGRRRAGGECARRRRQLGR

SEQ ID NO: 314 - protein, 12 aa, Mycobacterium tuberculosis
GRLIPGPRRVSQ

SEQ ID NO: 315 - protein, 7 aa, Mycobacterium tuberculosis
RLHRLCW

SEQ ID NO: 316 - protein, 143 aa, Mycobacterium tuberculosis; identical to SEQ ID NO: 285

SEQ ID NO: 317 - DNA, 300 bp, Mycobacterium tuberculosis
  CDS (1)..(150)
  CDS (154)..(243)
  CDS (247)..(300)
caagcccggccgcgactgtttgccgttttggggctcctaccagaacaccacctggcggccgcgcaccatggtgtgcaccagttgcgatcggttcctcccgcgcgcgggcggcgacgacgtcgatgcccgcgccccggcggcgcagctgcgtagctcgacccggtcgacgacgacggggtcggcggaccagtcggcgatgtcgaggcgatggcaatacagcgccttggtgcgcggccacacgtctgaggtggcgaagaccagtcccgcgcccaccggcagccggatccggatacgcggtac

SEQ ID NO: 318 - protein, 50 aa, Mycobacterium tuberculosis
QARPRLFAVLGLLPEHHLAAAHHGVHQLRSVPPARGRRRRRCPRPGGAAA

SEQ ID NO: 319 - protein, 30 aa, Mycobacterium tuberculosis
LDPVDDDGVGGPVGDVEAMAIQRLGARPHV

SEQ ID NO: 320 - protein, 18 aa, Mycobacterium tuberculosis
GGEDQSRAHRQPDPDTRY

SEQ ID NO: 321 - DNA, 299 bp, Mycobacterium tuberculosis
  CDS (1)..(297)
aagcccggccgcgactgtttgccgttttggggctcctaccagaacaccacctggcggccgcgcaccatggtgtgcaccagttgcgatcggttcctcccgcgcgcgggcggcgacgacgtcgatgcccgcgccccggcggcgcagctgcgtagctcgacccggtcgacgacgacggggtcggcggaccagtcggcgatgtcgaggcgatggcaatacagcgccttggtgcgcggccacacgtctgaggtggcgaagaccagtcccgcgcccaccggcagccggatccggatacgcggtac

SEQ ID NO: 322 - protein, 99 aa, Mycobacterium tuberculosis
KPGRDCLPFWGSYQNTTWRPRTMVCTSCDRFLPRAGGDDVDARAPAAQLRSSTRSTTTGSADQSAMSRRWQYSALVRGHTSEVAKTSPAPTGSRIRIRG

SEQ ID NO: 323 - DNA, 298 bp, Mycobacterium tuberculosis
  CDS (1)..(297)
agcccggccgcgactgtttgccgttttggggctcctaccagaacaccacctggcggccgcgcaccatggtgtgcaccagttgcgatcggttcctcccgcgcgcgggcggcgacgacgtcgatgcccgcgccccggcggcgcagctgcgtagctcgacccggtcgacgacgacggggtcggcggaccagtcggcgatgtcgaggcgatggcaatacagcgccttggtgcgcggccacacgtctgaggtggcgaagaccagtcccgcgcccaccggcagccggatccggatacgcggtac

SEQ ID NO: 324 - protein, 99 aa, Mycobacterium tuberculosis
SPAATVCRFGAPTRTPPGGRAPWCAPVAIGSSRARAATTSMPAPRRRSCVARPGRRRRGRRTSRRCRGDGNTAPWCAATRLRWRRPVPRPPAAGSGYAV

SEQ ID NO: 325 - DNA, 233 bp, Mycobacterium tuberculosis
  CDS (1)..(231)
ggcggccgcgcgccatggtgtgcaccagttgcgatcggttctcccgcgcgcgggcggcgacgacgtcgatggccgcgccccggcggctgcagctgcgtagctcgacccggtcgacgacgacggggtcggcgggccagtcggcgatgtcgaggcgatggcaatacagcgccttggtgcgcggccacacgtctgaggtggcgaagaccagtcccgcgcccaccggcagccggatc

SEQ ID NO: 326 - protein, 77 aa, Mycobacterium tuberculosis
GGRAPWCAPVAIGSPARGRRRRRWPRPGGCSCVARPGRRRRGRRASRRCRGDGNTAPWCAATRLRWRRPVPRPPAAG

SEQ ID NO: 327 - DNA, 232 bp, Mycobacterium tuberculosis
  CDS (1)..(96)
  CDS (100)..(189)
  CDS (193)..(231)
gcggccgcgcgccatggtgtgcaccagttgcgatcggttctcccgcgcgcgggcggcgacgacgtcgatggccgcgccccggcggctgcagctgcgtagctcgacccggtcgacgacgacggggtcggcgggccagtcggcgatgtcgaggcgatggcaatacagcgccttggtgcgcggccacacgtctgaggtggcgaagaccagtcccgcgcccaccggcagccggatc

SEQ ID NO: 328 - protein, 32 aa, Mycobacterium tuberculosis
AAARHGVHQLRSVLPRAGGDDVDGRAPAAAAA

SEQ ID NO: 329 - protein, 30 aa, Mycobacterium tuberculosis; identical to SEQ ID NO: 319

SEQ ID NO: 330 - protein, 13 aa, Mycobacterium tuberculosis
GGEDQSRAHRQPD

SEQ ID NO: 331 - DNA, 234 bp, Mycobacterium tuberculosis
  CDS (1)..(234)
tggcggccgcgcgccatggtgtgcaccagttgcgatcggttctcccgcgcgcgggcggcgacgacgtcgatggccgcgccccggcggctgcagctgcgtagctcgacccggtcgacgacgacggggtcggcgggccagtcggcgatgtcgaggcgatggcaatacagcgccttggtgcgcggccacacgtctgaggtggcgaagaccagtcccgcgcccaccggcagccggatc

SEQ ID NO: 332 - protein, 78 aa, Mycobacterium tuberculosis
WRPRAMVCTSCDRFSRARAATTSMAAPRRLQLRSSTRSTTTGSAGQSAMSRRWQYSALVRGHTSEVAKTSPAPTGSRI

SEQ ID NO: 333 - DNA, 615 bp, Mycobacterium tuberculosis
  CDS (4)..(612)
taaggtccgccaacgctttacgctcgacggccgccacgagttggccggccactttcaggccgtagtcgccgcagggcagggcttcccgcgtcgtcttcgcgggtttgtcggcaaaggtgtaggggtagcgttcgtgggcgtcgacgacgatgtgcagctcggggatgccggcggcgcgggcggtgggggtgcgcacgcccggccgcgactgtttgcgcgttttggggctctgccagaacaccacctggcggccgcgcgccatggtgtgcaccagttgcgatcggttctcccgcgcgcgggcggcgacgacgtcgatggccgcgccccggcggctgcagctgcgtagctcgacccggtcgacgacgacggggtcggcgggccagtcggcgatgtcgaggcgatggcaatacagcgccttggtgcgcggccacacgtctgaggtggcgaagaccagtcccgcgcccaccggcagccggatcaggtagggcaggcgcgagtcttcagcggggttggcggcgacgagcagctccacagagtgtgagggtacgggcggcgtacggcaacggtgaagcaggcactccgacgaacccatcgtcacgtcgaaggggcaggtga

SEQ ID NO: 334 - protein, 203 aa, Mycobacterium tuberculosis
GPPTLYARRPPRVGRPLSGRSRRRAGLPASSSRVCRQRCRGSVRGRRRRCAARGCRRRGRWGCARPAATVCAFWGSARTPPGGRAPWCAPVAIGSPARGRRRRRWPRPGGCSCVARPGRRRRGRRASRRCRGDGNTAPWCAATRLRWRRPVPRPPAAGSGRAGASLQRGWRRRAAPQSVRVRAAYGNGEAGTPTNPSSRRRGR

SEQ ID NO: 335 - DNA, 420 bp, Mycobacterium tuberculosis
  CDS (1)..(417)
gtgacggcactgctcgatgtcaatgtgctgatcgcgctgggctggccgaatcacgttcaccatgcggccgcgcagcgatggttcacgcagttctcctcgaatgggtgggccaccacgccgatcaccgaggcagggtatgtccgaatttcaagcaatcgcagtgtgatgcaggtgtcgaccacgccggctatcgcgatcgctcagttggcggcgatgacttctcttgccgggcacacgttttggcctgacgatgtgccactgatcgttgggagcgccggcgatcgcgatgcggtgtccaaccaccgtcgggtcaccgactgccatctcatcgccttggccgcgcgctacgggggccggttggtcacattcgatgccgcactggccgattcagcatccgcaggcctcgtcgaggtgttgtag

SEQ ID NO: 336 - protein, 139 aa, Mycobacterium tuberculosis
VTALLDVNVLIALGWPNHVHHAAAQRWFTQFSSNGWATTPITEAGYVRISSNRSVMQVSTTPAIAIAQLAAMTSLAGHTFWPDDVPLIVGSAGDRDAVSNHRRVTDCHLIALAARYGGRLVTFDAALADSASAGLVEVL

SEQ ID NO: 337 - DNA, 486 bp, Mycobacterium tuberculosis
  CDS (4)..(483)
tgatgttccgccggatgcgccgacggtgacttccgaggatgtcgtccgcgcgctcgaggacgacgtgtgacggcactgctcgatgtcaatgtgctgatcgcgctgggctggccgaatcacgttcaccatgcggccgcgcagcgatggttcacgcagttctcctcgaatgggtgggccaccacgccgatcaccgaggcagggtatgtccgaatttcaagcaatcgcagtgtgatgcaggtgtcgaccacgccggctatcgcgatcgctcagttggcggcgatgacttctcttgccgggcacacgttttggcctgacgatgtgccactgatcgttgggagcgccggcgatcgcgatgcggtgtccaaccaccgtcgggtcaccgactgccatctcatcgccttggccgcgcgctacgggggccggttggtcacattcgatgccgcactggccgattcagcatccgcaggcctcgtcgaggtgttgtag

SEQ ID NO: 338 - protein, 160 aa, Mycobacterium tuberculosis
CSAGCADGDFRGCRPRARGRRVTALLDVNVLIALGWPNHVHHAAAQRWFTQFSSNGWATTPITEAGYVRISSNRSVMQVSTTPAIAIAQLAAMTSLAGHTFWPDDVPLIVGSAGDRDAVSNHRRVTDCHLIALAARYGGRLVTFDAALADSASAGLVEVL

SEQ ID NO: 339 - DNA, 1520 bp, Mycobacterium tuberculosis
  CDS (4)..(483)
  CDS (487)..(675)
  CDS (679)..(1248)
  CDS (1252)..(1341)
  CDS (1345)..(1443)
  CDS (1447)..(1518)
tgatgttccgccggatgcgccgacggtgacttccgaggatgtcgtccgcgcgctcgaggacgacgtgtgacggcactgctcgatgtcaatgtgctgatcgcgctgggctggccgaatcacgttcaccatgcggccgcgcagcgatggttcacgcagttctcctcgaatgggtgggccaccacgccgatcaccgaggcagggtatgtccgaatttcaagcaatcgcagtgtgatgcaggtgtcgaccacgccggctatcgcgatcgctcagttggcggcgatgacttctcttgccgggcacacgttttggcctgacgatgtgccactgatcgttgggagcgccggcgatcgcgatgcggtgtccaaccaccgtcgggtcaccgactgccatctcatcgccttggccgcgcgctacgggggccggttggtcacattcgatgccgcactggccgattcagcatccgcaggcctcgtcgaggtgttgtagtcaccggggatgggcggctcgccaggcctgcaggatctgcgggcgcaggcgcccccggtcggacaccggcaggccgacgcttttggcccacgcgcgcagctcggcgctgctgggctcgggctcggcggcagccggctcgaaaaccgtggtggcgtcggcatcgtcgacgaaccaggtgagggcggcggctagatagcggtaggtgtattcctgggcgagcttgcgggtttggcagaacacgatcggcacgttgggaaagccgatctgcaattcggccagcccatcggcgatcgccgtcgggcgggcgaaggagtgcgcgaagatctccgagtagcggtcctcgaccaccacggcggcccgtggcagcgcggccagttcggtcagttggtatttcaggttgccgttcagcacgccagaagtaaggtccgccaacgctttacgctcgacggccgccacgagttggccggccactttcaggccgtagtcgccgcagggcagggcttcccgcgtcgtcttcgcgggtttgtcggcaaaggtgtaggggtagcgttcgtgggcgtcgacgacgatgtgcagctcggggatgccggcggcgcgggcggtgggggtgcgcacgcccggccgcgactgtttgcgcgttttggggctctgccagaacaccacctggcggccgcgcgccatggtgtgcaccagttgcgatcggttctcccgcgcgcgggcggcgacgacgtcgatggccgcgccccggcggctgcagctgcgtagctcgacccggtcgacgacgacggggtcggcgggccagtcggcgatgtcgaggcgatggcaatacagcgccttggtgcgcggccacacgtctgaggtggcgaagaccagtcccgcgcccaccggcagccggatcaggtagggcaggcgcgagtcttcagcggggttggcggcgacgagcagctccacagagtgtgagggtacgggcggcgtacggcaacggtgaagcaggcactccgacgaacccatcgtcacgtcgaaggggcaggtga

SEQ ID NO: 340 - protein, 160 aa, Mycobacterium tuberculosis; identical to SEQ ID NO: 338

SEQ ID NO: 341 - protein, 63 aa, Mycobacterium tuberculosis
SPGMGGSPGLQDLRAQAPPVGHRQADAFGPRAQLGAAGLGLGGSRLENRGGVGIVDEPGEGGG

SEQ ID NO: 342 - protein, 190 aa, Mycobacterium tuberculosis
IAVGVFLGELAGLAEHDRHVGKADLQFGQPIGDRRRAGEGVREDLRVAVLDHHGGPWQRGQFGQLVFQVAVQHARSKVRQRFTLDGRHELAGHFQAVVAAGQGFPRRLRGFVGKGVGVAFVGVDDDVQLGDAGGAGGGGAHARPRLFARFGALPEHHLAAARHGVHQLRSVLPRAGGDDVDGRAPAAAAA

SEQ ID NO: 343 - protein, 30 aa, Mycobacterium tuberculosis; identical to SEQ ID NO: 319

SEQ ID NO: 344 - protein, 33 aa, Mycobacterium tuberculosis
GGEDQSRAHRQPDQVGQARVFSGVGGDEQLHRV

SEQ ID NO: 345 - protein, 24 aa, Mycobacterium tuberculosis
GYGRRTATVKQALRRTHRHVEGAG

SEQ ID NO: 346 - DNA, 1520 bp, Mycobacterium tuberculosis; identical to SEQ ID NO: 339

SEQ ID NO: 347 - DNA, 1520 bp, Mycobacterium tuberculosis; identical to SEQ ID NO: 339
  CDS (3)..(26)
  CDS (30)..(311)
  CDS (315)..(662)
  CDS (666)..(905)
  CDS (909)..(1517)

SEQ ID NO: 348 - protein, 8 aa, Mycobacterium tuberculosis
MFRRMRRR

SEQ ID NO: 349 - protein, 94 aa, Mycobacterium tuberculosis
LPRMSSARSRTTCDGTARCQCADRAGLAESRSPCGRAAMVHAVLLEWVGHHADHRGRVCPNFKQSQCDAGVDHAGYRDRSVGGDDFSCRAHVLA

SEQ ID NO: 350 - protein, 116 aa, Mycobacterium tuberculosis
RCATDRWERRRSRCGVQPPSGHRLPSHRLGRALRGPVGHIRCRTGRFSIRRPRRGVVVTGDGRLARPAGSAGAGAPGRTPAGRRFWPTRAARRCWARARRQPARKPWWRRHRRRTR

SEQ ID NO: 351 - protein, 80 aa, Mycobacterium tuberculosis
GRRLDSGRCIPGRACGFGRTRSARWESRSAIRPAHRRSPSGGRRSARRSPSSGPRPPRRPVAARPVRSVGISGCRSARQK

SEQ ID NO: 352 - protein, 203 aa, Mycobacterium tuberculosis; identical to SEQ ID NO: 334

SEQ ID NO: 353 - DNA, 400 bp, Mycobacterium tuberculosis
  CDS (1)..(174)
  CDS (178)..(315)
  CDS (319)..(399)
tgcgcatgccgaccagtgtggttggccggagttcgtttgttcgcgattgcctcaacgattcgatataaccactctagtcacatcaaccacactcgtaccatcgagcgtgtgggttcatgccatgcattcgcgaccgcgggagccggcgaacccggcgccacacataatccagattgaggagacttccgtgccgaaccgacgccgacgcaagctttcgacagccatgagcgcggtcgccgccctggcagttgcaagtccttgtgcatattttcttgtctacgaatcaaccgaaacgaccgagcggcccgagcaccatgaattcaagcaggcggcggtgttgaccgacctgcccggcgagctgatgtccgcgctatcgcaggggttgtcccagttcgggatc

SEQ ID NO: 354 - protein, 58 aa, Mycobacterium tuberculosis
CACRPVWLAGVRLFAIASTIRYNHSSHINHTRTIERVGSCHAFATAGAGEPGATHNPD

SEQ ID NO: 355 - protein, 46 aa, Mycobacterium tuberculosis
GDFRAEPTPTQAFDSHERGRRPGSCKSLCIFSCLRINRNDRAARAP

SEQ ID NO: 356 - protein, 27 aa, Mycobacterium tuberculosis
IQAGGGVDRPARRADVRAIAGVVPVRD

SEQ ID NO: 357 - DNA, 399 bp, Mycobacterium tuberculosis
  CDS (1)..(399)
gcgcatgccgaccagtgtggttggccggagttcgtttgttcgcgattgcctcaacgattcgatataaccactctagtcacatcaaccacactcgtaccatcgagcgtgtgggttcatgccatgcattcgcgaccgcgggagccggcgaacccggcgccacacataatccagattgaggagacttccgtgccgaaccgacgccgacgcaagctttcgacagccatgagcgcggtcgccgccctggcagttggaagtccttgtgcatattttcttgtctacgaatcaaccgaaacgaccgagcggcccgagcaccatgaattcaagcaggcggcggtgttgaccgacctgcccggcgagctgatgtccgcgctatcgcaggggttgtcccagtccgggatc

SEQ ID NO: 358 - protein, 133 aa, Mycobacterium tuberculosis
AHADQCGWPEFVCSRLPQRFDITTLVTSTTLVPSSVWVHAMHSRPREPANPAPHIIQIEETSVPNRRRRKLSTAMSAVAALAVGSPCAYFLVYESTETTERPEHHEFKQAAVLTDLPGELMSALSQGLSQSGI

SEQ ID NO: 359 - DNA, 398 bp, Mycobacterium tuberculosis
  CDS (1)..(63)
  CDS (67)..(72)
  CDS (76)..(162)
  CDS (166)..(222)
  CDS (226)..(336)
  CDS (340)..(357)
  CDS (361)..(396)
cgcatgccgaccagtgtggttggccggagttcgtttgttcgcgattgcctcaacgattcgatataaccactctagtcacatcaaccacactcgtaccatcgagcgtgtgggttcatgccatgcattcgcgaccgcgggagccggcgaacccggcgccacacataatccagattgaggagacttccgtgccgaaccgacgccgacgcaagctttcgacagccatgagcgcggtcgccgccctggcagttgcaagtccttgtgcatattttcttgtctacgaatcaaccgaaacgaccgagcggcccgagcaccatgaattcaagcaggcggcggtgttgaccgacctgcccggcgagctgatgtccgcgctatcgcaggggttgtcccagttcgggatc

SEQ ID NO: 360 - protein, 21 aa, Mycobacterium tuberculosis
RMPTSVVGRSSFVRDCLNDSI

SEQ ID NO: 361 - DNA, 359 bp, Mycobacterium tuberculosis
  CDS (1)..(51)
  CDS (55)..(354)
gcgggccaccgatcagtcgatcgggtggtttccgctccatcagcccggaattgaggtgccgcagtgacgacaccagcgcaggacgcgccgttggtgtttccctctgttgctttcccgtccggctcgcctttttttcatcaacgttggactgccgcagtggcgatgttggtcgccggcgtgttcggtcacctgacggtcgggatgttccttgggtctcgggttgctgctgggtttgctcaatgccctgctggtgcggcgttcggccgagtcgatcaccgccaaagagcacccgttaaaacggtcgatggccctcaactcggcatcgcgactggcgattatcaccatgcctcgggctgatc

SEQ ID NO: 362 - protein, 17 aa, Mycobacterium tuberculosis
AGHRSVDRVVSAPSARN

SEQ ID NO: 363 - protein, 100 aa, Mycobacterium tuberculosis
GAAVTTPAQDAPLVFPSVAFPSGSPFFHQRWTAAVAMLVAGVFGHLTVGMFLGSRVAAGFAQCPAGAAFGRVDHRQRAPVKTVDGPQLGIATGDYHHASG

SEQ ID NO: 364 - DNA, 358 bp, Mycobacterium tuberculosis
  CDS (1)..(63)
  CDS (67)..(189)
  CDS (193)..(357)
cgggccaccgatcagtcgatcgggtggtttccgctccatcagcccggaattgaggtgccgcagtgacgacaccagcgcaggacgcgccgttggtgtttccctctgttgctttcccgtccggctcgcctttttttcatcaacgttggactgccgcagtggcgatgttggtcgccggcgtgttcggtcacctgacggtcgggatgttccttgggtctcgggttgctgctgggtttgctcaatgccctgctggtgcggcgttcggccgagtcgatcaccgccaaagagcacccgttaaaacggtcgatggccctcaactcggcatcgcgactggcgattatcaccatgcctcgggctgatc

SEQ ID NO: 365 - protein, 21 aa, Mycobacterium tuberculosis
RATDQSIGWFPLHQPGIEVPQ

SEQ ID NO: 366 - protein, 41 aa, Mycobacterium tuberculosis
RHQRRTRRWCFPLLLSRPARLFFINVGLPQWRCWSPACSVT

SEQ ID NO: 367 - protein, 55 aa, Mycobacterium tuberculosis
RSGCSLGLGLLLGLLNALLVRRSAESITAKEHPLKRSMALNSASRLAIITMPRAD

SEQ ID NO: 368 - DNA, 357 bp, Mycobacterium tuberculosis
  CDS (1)..(291)
  CDS (295)..(357)
gggccaccgatcagtcgatcgggtggtttccgctccatcagcccggaattgaggtgccgcagtgacgacaccagcgcaggacgcgccgttggtgtttccctctgttgctttcccgtccggctcgcctttttttcatcaacgttggactgccgcagtggcgatgttggtcgccggcgtgttcggtcacctgacggtcgggatgttccttgggtctcgggttgctgctgggtttgctcaatgccctgctggtgcggcgttcggccgagtcgatcaccgccaaagagcacccgttaaaacggtcgatggccctcaactcggcatcgcgactggcgattatcaccatgcctcgggctgatc

SEQ ID NO: 369 - protein, 97 aa, Mycobacterium tuberculosis
GPPISRSGGFRSISPELRCRSDDTSAGRAVGVSLCCFPVRLAFFSSTLDCRSGDVGRRRVRSPDGRDVPWVSGCCWVCSMPCWCGVRPSRSPPKSTR

SEQ ID NO: 370 - protein, 21 aa, Mycobacterium tuberculosis
NGRWPSTRHRDWRLSPCLGLI

SEQ ID NO: 371 - DNA, 492 bp, Mycobacterium tuberculosis
  CDS (1)..(3)
  CDS (7)..(186)
  CDS (190)..(492)
ggctagaaccccgaaggagacctcgcgggttgccggcccccggcccatcggatgcgtatccggtcgcgccgattcacgaccgacatagggagctaccccttgggtgattccggtgcgacgactgcgatacgctcggcgggccaccgatcagtcgatcgggtggtttccgctccatcagcccggaattgaggtgccgcagtgacgacaccagcgcaggacgcgccgttggtgtttccctctgttgctttccgtccggttcgcctttttttcatcaacgttggactggccgcagtggcgatgttggtcgccggcgtgttcggtcacctgacggtcgggatgttcttgggtctcgggttgctgctgggtttgctcaatgccctgctggtgcggcgttcggccgagtcgatcaccgccaaagagcacccgttaaaacggtcgatggccctcaactcggcatcgcgactggcgattatcaccatcctcgggctgatc

SEQ ID NO: 372 - protein, 60 aa, Mycobacterium tuberculosis
NPEGDLAGCRPPAHRMRIRSRRFTTDIGSYPLGDSGATTAIRSAGHRSVDRVVSAPSARN

SEQ ID NO: 373 - protein, 101 aa, Mycobacterium tuberculosis
GAAVTTPAQDAPLVFPSVAFRPVRLFFINVGLAAVAMLVAGVFGHLTVGMFLGLGLLLGLLNALLVRRSAESITAKEHPLKRSMALNSASRLAIITILGLI

SEQ ID NO: 374 - DNA, 491 bp, Mycobacterium tuberculosis
  CDS (1)..(84)
  CDS (88)..(198)
  CDS (202)..(324)
  CDS (328)..(426)
  CDS (430)..(486)
gctagaaccccgaaggagacctcgcgggttgccggcccccggcccatcggatgcgtatccggtcgcgccgattcacgaccgacatagggagctaccccttgggtgattccggtgcgacgactgcgatacgctcggcgggccaccgatcagtcgatcgggtggtttccgctccatcagcccggaattgaggtgccgcagtgacgacaccagcgcaggacgcgccgttggtgtttccctctgttgctttccgtccggttcgcctttttttcatcaacgttggactggccgcagtggcgatgttggtcgccggcgtgttcggtcacctgacggtcgggatgttcttgggtctcgggttgctgctgggtttgctcaatgccctgctggtgcggcgttcggccgagtcgatcaccgccaaagagcacccgttaaaacggtcgatggccctcaactcggcatcgcgactggcgattatcaccatcctcgggctgatc

SEQ ID NO: 375 - protein, 28 aa, Mycobacterium tuberculosis
ARTPKETSRVAGPRPIGCVSGRADSRPT

SEQ ID NO: 376 - protein, 37 aa, Mycobacterium tuberculosis
GATPWVIPVRRLRYARRATDQSIGWFPLHQPGIEVPQ

SEQ ID NO: 377 - protein, 41 aa, Mycobacterium tuberculosis
RHQRRTRRWCFPLLLSVRFAFFSSTLDWPQWRCWSPACSVT

SEQ ID NO: 378 - protein, 33 aa, Mycobacterium tuberculosis
RSGCSWVSGCCWVCSMPCWCGVRPSRSPPKSTR

SEQ ID NO: 379 - protein, 19 aa, Mycobacterium tuberculosis
NGRWPSTRHRDWRLSPSSG

SEQ ID NO: 380 - DNA, 490 bp, Mycobacterium tuberculosis
  CDS (1)..(102)
  CDS (106)..(489)
ctagaaccccgaaggagacctcgcgggttgccggcccccggcccatcggatgcgtatccggtcgcgccgattcacgaccgacatagggagctaccccttgggtgattccggtgcgacgactgcgatacgctcggcgggccaccgatcagtcgatcgggtggtttccgctccatcagcccggaattgaggtgccgcagtgacgacaccagcgcaggacgcgccgttggtgtttccctctgttgctttccgtccggttcgcctttttttcatcaacgttggactggccgcagtggcgatgttggtcgccggcgtgttcggtcacctgacggtcgggatgttcttgggtctcgggttgctgctgggtttgctcaatgccctgctggtgcggcgttcggccgagtcgatcaccgccaaagagcacccgttaaaacggtcgatggccctcaactcggcatcgcgactggcgattatcaccatcctcgggctgatc

SEQ ID NO: 381 - protein, 34 aa, Mycobacterium tuberculosis
LEPRRRPRGLPAPGPSDAYPVAPIHDRHRELPLG

SEQ ID NO: 382 - protein, 128 aa, Mycobacterium tuberculosis
FRCDDCDTLGGPPISRSGGFRSISPELRCRSDDTSAGRAVGVSLCCFPSGSPFFHQRWTGRSGDVGRRRVRSPDGRDVLGSRVAAGFAQCPAGAAFGRVDHRQRAPVKTVDGPQLGIATGDYHHPRAD

SEQ ID NO: 383 - DNA, 486 bp, Mycobacterium tuberculosis
  CDS (1)..(483)
atgacgacaccagcgcaggacgcgccgttggtgtttccctctgttgctttccgtccggttcgcctttttttcatcaacgttggactggccgcagtggcgatgttggtcgccggcgtgttcggtcacctgacggtcgggatgttcttgggtctcgggttgctgctgggtttgctcaatgccctgctggtgcggcgttcggccgagtcgatcaccgccaaagagcacccgttaaaacggtcgatggccctcaactcggcatcgcgactggcgattatcaccatcctcgggctgatcatcgcctacattttccggcccgctggattgggcgtcgtgttcgggctggcattcttccaggtgctgctggtggcaacgacggccctgccggtcctgaagaagctgcgcactgcgaccgaggaaccggtcgcaacttattcttccaatggccagaccgggggatcggaaggaaggagcgccagcgatgactga

SEQ ID NO: 384 - protein, 161 aa, Mycobacterium tuberculosis
MTTPAQDAPLVFPSVAFRPVRLFFINVGLAAVAMLVAGVFGHLTVGMFLGLGLLLGLLNALLVRRSAESITAKEHPLKRSMALNSASRLAIITILGLIIAYIFRPAGLGVVFGLAFFQVLLVATTALPVLKKLRTATEEPVATYSSNGQTGGSEGRSASDD

SEQ ID NO: 385 - DNA, 498 bp, Mycobacterium tuberculosis
  CDS (4)..(495)
tgaggtgccgcagtgacgacaccagcgcaggacgcgccgttggtgtttccctctgttgctttccgtccggttcgcctttttttcatcaacgttggactggccgcagtggcgatgttggtcgccggcgtgttcggtcacctgacggtcgggatgttcttgggtctcgggttgctgctgggtttgctcaatgccctgctggtgcggcgttcggccgagtcgatcaccgccaaagagcacccgttaaaacggtcgatggccctcaactcggcatcgcgactggcgattatcaccatcctcgggctgatcatcgcctacattttccggcccgctggattgggcgtcgtgttcgggctggcattcttccaggtgctgctggtggcaacgacggccctgccggtcctgaagaagctgcgcactgcgaccgaggaaccggtcgcaacttattcttccaatggccagaccgggggatcggaaggaaggagcgccagcgatgactga

SEQ ID NO: 386 - protein, 164 aa, Mycobacterium tuberculosis
GAAVTTPAQDAPLVFPSVAFRPVRLFFINVGLAAVAMLVAGVFGHLTVGMFLGLGLLLGLLNALLVRRSAESITAKEHPLKRSMALNSASRLAIITILGLIIAYIFRPAGLGVVFGLAFFQVLLVATTALPVLKKLRTATEEPVATYSSNGQTGGSEGRSASDD

SEQ ID NO: 387 - DNA, 390 bp, Mycobacterium tuberculosis
  CDS (1)..(390)
gtcgaacaggtacggaaggcgccgtcggtcgctcggtccgctggtatctcgtgttcagccagccagcggccgttaacgtggccgaacaggtcgtcttggggtcgggcatcagcgtcgatgtggctcaggtcgatacccgaggggatggcaagtgtcaccccgccatccttccacctcttttcgggtgcaacgatcgggccatgcctgacggggagcagagccagccaccggcccaagaagatgcggaagacgactcgcggcccgacgccgcggaggccgccgcggccgaacccaaatcatcagccggtcccgatgttctcgacctacggtatcgcctcgacactactcggcgtgctatcggtcgccgcggtcgtgctgggtgcgatgatc

SEQ ID NO: 388 - protein, 130 aa, Mycobacterium tuberculosis
VEQVRKAPSVARSAGISCSASQRPLTWPNRSSWGRASASMWLRSIPEGMASVTPPSFHLFSGATIGPCLTGSRASHRPKKMRKTTRGPTPRRPPRPNPNHQPVPMFSTYGIASTLLGVLSVAAVVLGAMI

SEQ ID NO: 389 - DNA, 389 bp, Mycobacterium tuberculosis
  CDS (1)..(72)
  CDS (76)..(204)
  CDS (208)..(384)
tcgaacaggtacggaaggcgccgtcggtcgctcggtccgctggtatctcgtgttcagccagccagcggccgttaacgtggccgaacaggtcgtcttggggtcgggcatcagcgtcgatgtggctcaggtcgatacccgaggggatggcaagtgtcaccccgccatccttccacctcttttcgggtgcaacgatcgggccatgcctgacggggagcagagccagccaccggcccaagaagatgcggaagacgactcgcggcccgacgccgcggaggccgccgcggccgaacccaaatcatcagccggtcccgatgttctcgacctacggtatcgcctcgacactactcggcgtgctatcggtcgccgcggtcgtgctgggtgcgatgatc

SEQ ID NO: 390 - protein, 24 aa, Mycobacterium tuberculosis
SNRYGRRRRSLGPLVSRVQPASGR

SEQ ID NO: 391 - protein, 43 aa, Mycobacterium tuberculosis
RGRTGRLGVGHQRRCGSGRYPRGWQVSPRHPSTSFRVQRSGHA

SEQ ID NO: 392 - protein, 59 aa, Mycobacterium tuberculosis
RGAEPATGPRRCGRRLAARRRGGRRGRTQIISRSRCSRPTVSPRHYSACYRSPRSCWVR

SEQ ID NO: 393 - DNA, 388 bp, Mycobacterium tuberculosis
  CDS (1)..(387)
cgaacaggtacggaaggcgccgtcggtcgctcggtccgctggtatctcgtgttcagccagccagcggccgttaacgtggccgaacaggtcgtcttggggtcgggcatcagcgtcgatgtggctcaggtcgatacccgaggggatggcaagtgtcaccccgccatccttccacctcttttcgggtgcaacgatcgggccatgcctgacggggagcagagccagccaccggcccaagaagatgcggaagacgactcgcggcccgacgccgcggaggccgccgcggccgaacccaaatcatcagccggtcccgatgttctcgacctacggtatcgcctcgacactactcggcgtgctatcggtcgccgcggtcgtgctgggtgcgatgatc

SEQ ID NO: 394 - protein, 129 aa, Mycobacterium tuberculosis
RTGTEGAVGRSVRWYLVFSQPAAVNVAEQVVLGSGISVDVAQVDTRGDGKCHPAILPPLFGCNDRAMPDGEQSQPPAQEDAEDDSRPDAAEAAAAEPKSSAGPDVLDLRYRLDTTRRAIGRRGRAGCDD

SEQ ID NO: 395 - DNA, 375 bp, Mycobacterium tuberculosis
  CDS (1)..(375)
gaaggcgccgtcggtcgctcggtccgctggtatctcgtgttcagccagccagcggccgttaacgtggccgaacaggtcgtcttggggtcgggcatcagcgtcgatgtggctcaggtcgatacccgaggggatggcaagtgtcaccccgccatccttccacctcttttcgggtgcaacgatcgggccatgcctgacggggagcagagccagccaccggcccaagaagatgcggaagacgactcgcggcccgacgccgcggaggccgccgcggccgaacccaaatcatcagccggtccgatgttctcgacctacggtatcgcctcgacactactcggcgtgctatcggtcgccgcggtcgtgctgggtgcgatgatc

SEQ ID NO: 396 - protein, 125 aa, Mycobacterium tuberculosis
EGAVGRSVRWYLVFSQPAAVNVAEQVVLGSGISVDVAQVDTRGDGKCHPAILPPLFGCNDRAMPDGEQSQPPAQEDAEDDSRPDAAEAAAAEPKSSAGPMFSTYGIASTLLGVLSVAAVVLGAMI

SEQ ID NO: 397 - DNA, 377 bp, Mycobacterium tuberculosis
  CDS (1)..(372)
cggaaggcgccgtcggtcgctcggtccgctggtatctcgtgttcagccagccagcggccgttaacgtggccgaacaggtcgtcttggggtcgggcatcagcgtcgatgtggctcaggtcgatacccgaggggatggcaagtgtcaccccgccatccttccacctcttttcgggtgcaacgatcgggccatgcctgacggggagcagagccagccaccggcccaagaagatgcggaagacgactcgcggcccgacgccgcggaggccgccgcggccgaacccaaatcatcagccggtccgatgttctcgacctacggtatcgcctcgacactactcggcgtgctatcggtcgccgcggtcgtgctgggtgcgatgatc

SEQ ID NO: 398 - protein, 124 aa, Mycobacterium tuberculosis
RKAPSVARSAGISCSASQRPLTWPNRSSWGRASASMWLRSIPEGMASVTPPSFHLFSGATIGPCLTGSRASHRPKKMRKTTRGPTPRRPPRPNPNHQPVRCSRPTVSPRHYSACYRSPRSCWVR

SEQ ID NO: 399 - DNA, 376 bp, Mycobacterium tuberculosis
  CDS (1)..(60)
  CDS (64)..(192)
  CDS (196)..(375)
ggaaggcgccgtcggtcgctcggtccgctggtatctcgtgttcagccagccagcggccgttaacgtggccgaacaggtcgtcttggggtcgggcatcagcgtcgatgtggctcaggtcgatacccgaggggatggcaagtgtcaccccgccatccttccacctcttttcgggtgcaacgatcgggccatgcctgacggggagcagagccagccaccggcccaagaagatgcggaagacgactcgcggcccgacgccgcggaggccgccgcggccgaacccaaatcatcagccggtccgatgttctcgacctacggtatcgcctcgacactactcggcgtgctatcggtcgccgcggtcgtgctgggtgcgatgatc

SEQ ID NO: 400 - protein, 20 aa, Mycobacterium tuberculosis
GRRRRSLGPLVSRVQPASGR

SEQ ID NO: 401 - protein, 43 aa, Mycobacterium tuberculosis; identical to SEQ ID NO: 391

SEQ ID NO: 402 - protein, 60 aa, Mycobacterium tuberculosis
RGAEPATGPRRCGRRLAARRRGGRRGRTQIISRSDVLDLRYRLDTTRRAIGRRGRAGCDD

SEQ ID NO: 403 - DNA, 660 bp, Mycobacterium tuberculosis
  CDS (1)..(657)
atgcctgacggggagcagagccagccaccggcccaagaagatgcggaagacgactcgcggcccgacgccgcggaggccgccgcggccgaacccaaatcatcagccggtccgatgttctcgacctacggtatcgcctcgacactactcggcgtgctatcggtcgccgcggtcgtgctgggtgcgatgatctggtccgcacaccgcgatgactccggcgagcgtacctacctgacccgggtcatgctgaccgccgctgaatggacggccgtgctgatcaacatgaacgccgacaacatcgatgccagcctgcagcgactgcacgacggaacggtcggtcaactcaacaccgacttcgacgctgtcgtgcagccctaccggcaggtggtggagaagttgcggacgcacagcagcggcaggatcgaggcggtagcgatcgatacggtgcaccgcgagctggatacccagtccggtgccgcccgaccggtagtaaccacgaaattgccaccgtttgccactcgcaccgactcggtgctgctggtcgcgacgtcggtcagtgagaacgccggcgccaaaccccagaccgtgcactggaacttgcggctcgatgtctccgatgtggacggcaagctgatgatctcccggttggagtcgattcgatga

SEQ ID NO: 404 - protein, 219 aa, Mycobacterium tuberculosis
MPDGEQSQPPAQEDAEDDSRPDAAEAAAAEPKSSAGPMFSTYGIASTLLGVLSVAAVVLGAMIWSAHRDDSGERTYLTRVMLTAAEWTAVLINMNADNIDASLQRLHDGTVGQLNTDFDAVVQPYRQVVEKLRTHSSGRIEAVAIDTVHRELDTQSGAARPVVTTKLPPFATRTDSVLLVATSVSENAGAKPQTVHWNLRLDVSDVDGKLMISRLESIR

SEQ ID NO: 405 - DNA, 1176 bp, Mycobacterium tuberculosis
  CDS (4)..(1173)
taatccgatgccggattgggtgaaatgcaccaagtaacgggtcgagtctttggaatcggtatcgacatagactccgatgccgccgcccacgccggcacgttgcagagtgccaagggcggcggccaattcggtggcgtcggccgcgctgtcaatcgtggccaattcgtcgtgcagcggttgcacccctgcgcgctcgacggcttcctcgtcgaggaagctggcgtagaggtcgccgatgcgctgcgcatcggtgcctaccgcagcacctgcttggctggcctggatgatcaggtctcgcacttgtgtctcggcgcggtcgaacaggctacggaaggcgccgtcggtcgctcggtccgctggtatctcgtgttcagccagccagcggccgttaacgtggccgaacaggtcgtcttggggtcgggcatcagcgtcgatgtggctcaggtcgatacccgaggggatggcaagtgtcaccccgccatccttccacctcttttcgggtgcaacgatcgggccatgcctgacggggagcagagccagccaccggcccaagaagatgcggaagacgactcgcggcccgacgccgcggaggccgccgcggccgaacccaaatcatcagccggtccgatgttctcgacctacggtatcgcctcgacactactcggcgtgctatcggtcgccgcggtcgtgctgggtgcgatgatctggtccgcacaccgcgatgactccggcgagcgtacctacctgacccgggtcatgctgaccgccgctgaatggacggccgtgctgatcaacatgaacgccgacaacatcgatgccagcctgcagcgactgcacgacggaacggtcggtcaactcaacaccgacttcgacgctgtcgtgcagccctaccggcaggtggtggagaagttgcggacgcacagcagcggcaggatcgaggcggtagcgatcgatacggtgcaccgcgagctggatacccagtccggtgccgcccgaccggtagtaaccacgaaattgccaccgtttgccactcgcaccgactcggtgctgctggtcgcgacgtcggtcagtgagaacgccggcgccaaaccccagaccgtgcactggaacttgcggctcgatgtctccgatgtggacggcaagctgatgatctcccggttggagtcgattcgatga

SEQ ID NO: 406 - protein, 390 aa, Mycobacterium tuberculosis
SDAGLGEMHQVTGRVFGIGIDIDSDAAAHAGTLQSAKGGGQFGGVGRAVNRGQFVVQRLHPCALDGFLVEEAGVEVADALRIGAYRSTCLAGLDDQVSHLCLGAVEQATEGAVGRSVRWYLVFSQPAAVNVAEQVVLGSGISVDVAQVDTRGDGKCHPAILPPLFGCNDRAMPDGEQSQPPAQEDAEDDSRPDAAEAAAAEPKSSAGPMFSTYGIASTLLGVLSVAAVVLGAMIWSAHRDDSGERTYLTRVMLTAAEWTAVLINMNADNIDASLQRLHDGTVGQLNTDFDAVVQPYRQVVEKLRTHSSGRIEAVAIDTVHRELDTQSGAARPVVTTKLPPFATRTDSVLLVATSVSENAGAKPQTVHWNLRLDVSDVDGKLMISRLESIR

SEQ ID NO: 407 - DNA, 380 bp, Mycobacterium tuberculosis
  CDS (1)..(153)
  CDS (157)..(378)
gttgcgcaacggggtgagcaccgacgcgatgatggcgcaactatcgaaactgcaggacatcgccaacgccaacgacggcactcgcgcggtgggcacccctggctatcaggccagcgtcgactatgtggtaaacacactgcgcaacagcggttttgatgtgcaaaccccggagttctccgctcgcgtgttcaaggccgaaaaaggggtggtgaccctcggcggcaacaccgtggaggcgagggcgctcgagtacagcctcggcacaccgccggacggggtgacgggcccgctggtggctgcccccgccgacgacagtccgggctgcagtccgtcggactacgacaggctgccggtgtccggtgcggtggtgctggtagatc

SEQ ID NO: 408 - protein, 51 aa, Mycobacterium tuberculosis
VAQRGEHRRDDGATIETAGHRQRQRRHSRGGHPWLSGQRRLCGKHTAQQRF

SEQ ID NO: 409 - protein, 74 aa, Mycobacterium tuberculosis
CANPGVLRSRVQGRKRGGDPRRQHRGGEGARVQPRHTAGRGDGPAGGCPRRRQSGLQSVGLRQAAGVRCGGAGR

SEQ ID NO: 410 - DNA, 379 bp, Mycobacterium tuberculosis
  CDS (1)..(378)
ttgcgcaacggggtgagcaccgacgcgatgatggcgcaactatcgaaactgcaggacatcgccaacgccaacgacggcactcgcgcggtgggcacccctggctatcaggccagcgtcgactatgtggtaaacacactgcgcaacagcggttttgatgtgcaaaccccggagttctccgctcgcgtgttcaaggccgaaaaaggggtggtgaccctcggcggcaacaccgtggaggcgagggcgctcgagtacagcctcggcacaccgccggacggggtgacgggcccgctggtggctgcccccgccgacgacagtccgggctgcagtccgtcggactacgacaggctgccggtgtccggtgcggtggtgctggtagatc

SEQ ID NO: 411 - protein, 126 aa, Mycobacterium tuberculosis
LRNGVSTDAMMAQLSKLQDIANANDGTRAVGTPGYQASVDYVVNTLRNSGFDVQTPEFSARVFKAEKGVVTLGGNTVEARALEYSLGTPPDGVTGPLVAAPADDSPGCSPSDYDRLPVSGAVVLVD

SEQ ID NO: 412 - DNA, 378 bp, Mycobacterium tuberculosis
  CDS (1)..(12)
  CDS (16)..(27)
  CDS (31)..(126)
  CDS (130)..(207)
  CDS (211)..(276)
  CDS (280)..(372)
  CDS (376)..(378)
tgcgcaacggggtgagcaccgacgcgatgatggcgcaactatcgaaactgcaggacatcgccaacgccaacgacggcactcgcgcggtgggcacccctggctatcaggccagcgtcgactatgtggtaaacacactgcgcaacagcggttttgatgtgcaaaccccggagttctccgctcgcgtgttcaaggccgaaaaaggggtggtgaccctcggcggcaacaccgtggaggcgagggcgctcgagtacagcctcggcacaccgccggacggggtgacgggcccgctggtggctgcccccgccgacgacagtccgggctgcagtccgtcggactacgacaggctgccggtgtccggtgcggtggtgctggtagatc

SEQ ID NO: 413 - protein, 4 aa, Mycobacterium tuberculosis
CATG

SEQ ID NO: 414 - protein, 4 aa, Mycobacterium tuberculosis
APTR

SEQ ID NO: 415 - protein, 32 aa, Mycobacterium tuberculosis
WRNYRNCRTSPTPTTALARWAPLAIRPASTMW

SEQ ID NO: 416 - protein, 26 aa, Mycobacterium tuberculosis
THCATAVLMCKPRSSPLACSRPKKGW

SEQ ID NO: 417 - protein, 22 aa, Mycobacterium tuberculosis
PSAATPWRRGRSSTASAHRRTG

SEQ ID NO: 418 - protein, 31 aa, Mycobacterium tuberculosis
RARWWLPPPTTVRAAVRRTTTGCRCPVRWCW

SEQ ID NO: 419 - DNA, 340 bp, Mycobacterium tuberculosis
  CDS (1)..(339)
ctatcgaaactgcaggacatcgccaacgccaacgacggcactcgcgcggtgggcacccctggctatcaggccagcgtcgactatgtggtaaacacactgcgcaacagcggttttgatgtgcaaaccccggagttctccgctcgcgtgttcaaggccgaaaaaggggtggtgaccctcggcggcaacaccgtggaggcgagggcgctcgagtacagcctcggcacaccgccggacggggtgacgggcccgctggtggctgcccccgccgacgacagtccgggctgcagtccgtcggactacgacaggctgccggtgtccggtgcggtggtgctggtagatc

SEQ ID NO: 420 - protein, 113 aa, Mycobacterium tuberculosis
LSKLQDIANANDGTRAVGTPGYQASVDYVVNTLRNSGFDVQTPEFSARVFKAEKGVVTLGGNTVEARALEYSLGTPPDGVTGPLVAAPADDSPGCSPSDYDRLPVSGAVVLVD

SEQ ID NO: 421 - DNA, 339 bp, Mycobacterium tuberculosis
  CDS (1)..(87)
  CDS (91)..(168)
  CDS (172)..(237)
  CDS (241)..(333)
  CDS (337)..(339)
tatcgaaactgcaggacatcgccaacgccaacgacggcactcgcgcggtgggcacccctggctatcaggccagcgtcgactatgtggtaaacacactgcgcaacagcggttttgatgtgcaaaccccggagttctccgctcgcgtgttcaaggccgaaaaaggggtggtgaccctcggcggcaacaccgtggaggcgagggcgctcgagtacagcctcggcacaccgccggacggggtgacgggcccgctggtggctgcccccgccgacgacagtccgggctgcagtccgtcggactacgacaggctgccggtgtccggtgcggtggtgctggtagatc

SEQ ID NO: 422 - protein, 29 aa, Mycobacterium tuberculosis
YRNCRTSPTPTTALARWAPLAIRPASTMW

SEQ ID NO: 423 - protein, 26 aa, Mycobacterium tuberculosis
THCATAVLMCKPRSSPLACSRPKKGW

SEQ ID NO: 424 - protein, 22 aa, Mycobacterium tuberculosis
PSAATPWRRGRSSTASAHRRTG

SEQ ID NO: 425 - protein, 31 aa, Mycobacterium tuberculosis; identical to SEQ ID NO: 418

SEQ ID NO: 426 - DNA, 338 bp, Mycobacterium tuberculosis
  CDS (1)..(111)
  CDS (115)..(336)
atcgaaactgcaggacatcgccaacgccaacgacggcactcgcgcggtgggcacccctggctatcaggccagcgtcgactatgtggtaaacacactgcgcaacagcggttttgatgtgcaaaccccggagttctccgctcgcgtgttcaaggccgaaaaaggggtggtgaccctcggcggcaacaccgtggaggcgagggcgctcgagtacagcctcggcacaccgccggacggggtgacgggcccgctggtggctgcccccgccgacgacagtccgggctgcagtccgtcggactacgacaggctgccggtgtccggtgcggtggtgctggtagatc

SEQ ID NO: 427 - protein, 37 aa, Mycobacterium tuberculosis
IETAGHRQRQRRHSRGGHPWLSGQRRLCGKHTAQQRF

SEQ ID NO: 428 - protein, 74 aa, Mycobacterium tuberculosis; identical to SEQ ID NO: 409

SEQ ID NO: 429 - DNA, 1503 bp, Mycobacterium tuberculosis
  CDS (1)..(1500)
atggtgaacaaatccaggatgatgccggcggtgctggccgtggctgtggtcgtcgcattcctgacgacgggctgtatccggtggtctacgcagtcgcggcccgttgttaacggccccgctgccgcagagttcgccgttgcgttgcgcaaccgggtgagcaccgacgcgatgatggcgcacctatcgaaactgcaggacatcgccaacgccaacgacggcactcgcgcggtgggcacccctggctatcaggccagcgtcgactatgtggtaaacacactgcgcaacagcggttttgatgtgcaaaccccggagttctccgctcgcgtgttcaaggccgaaaaaggggtggtgaccctcggcggcaacaccgtggaggcgagggcgctcgagtacagcctcggcacaccgccggacggggtgacgggcccgctggtggctgcccccgccgacgacagtccgggctgcagtccgtcggactacgacaggctgccggtgtccggtgcggtggtgctggtagatcgcggcgtctgtccttttgcccagaaggaagacgcagccgcgcagcgcggtgcggtggcgctgatcattgctgacaacatcgacgagcaggcgatgggcggcaccctgggggctaataccgacgtcaagatcccggtggtgagtgtcaccaagtcggtcggattccagctacgcggacagtctgggccaaccaccgtcaagctcacggcgagcacccaaagtttcaaggcccgcaacgtcatcgcgcagacgaagacggggtcgtcggccaacgtggtgatggcaggtgcgcatttggacagcgttccggaaggacccggcatcaacgacaacggctcgggagtggctgcggttctggaaacggcagtgcagctggggaactcaccgcatgtgtccaacgcggtacggttcgccttctggggcgccgaggaattcggcctgattgggtcacgaaactacgtcgagtcgctggacatcgacgcgctcaaaggcatcgcgctgtatctgaacttcgacatgttggcgtcgccgaacccgggttacttcacctacgacggtgaccagtcgctgccgctagacgcccgcggtcagccggtggtgcccgaaggctcggccggtatcgagcgcacgttcgtcgcctatctgaagatggccggcaagaccgcgcaggacacctcgttcgacggtcggtccgactacgacggcttcacgctggcgggtatcccttcgggtggcctgttctccggcgctgaggtcaagaagtccgccgagcaagccgagctctggggcggcaccgccgacgagcctttcgatcccaactatcaccagaagacagacaccctggaccatatcgaccgcaccgcgctcggtatcaacggcgctggcgtcgcgtacgcggtgggtttgtatgcgcaggacctcggcggccccaacggggttccggtcatggcggaccgcacccgccacctgattgccaaaccgtga

SEQ ID NO: 430 - protein, 500 aa, Mycobacterium tuberculosis
MVNKSRMMPAVLAVAVVVAFLTTGCIRWSTQSRPVVNGPAAAEFAVALRNRVSTDAMMAHLSKLQDIANANDGTRAVGTPGYQASVDYVVNTLRNSGFDVQTPEFSARVFKAEKGVVTLGGNTVEARALEYSLGTPPDGVTGPLVAAPADDSPGCSPSDYDRLPVSGAVVLVDRGVCPFAQKEDAAAQRGAVALIIADNIDEQAMGGTLGANTDVKIPVVSVTKSVGFQLRGQSGPTTVKLTASTQSFKARNVIAQTKTGSSANVVMAGAHLDSVPEGPGINDNGSGVAAVLETAVQLGNSPHVSNAVRFAFWGAEEFGLIGSRNYVESLDIDALKGIALYLNFDMLASPNPGYFTYDGDQSLPLDARGQPVVPEGSAGIERTFVAYLKMAGKTAQDTSFDGRSDYDGFTLAGIPSGGLFSGAEVKKSAEQAELWGGTADEPFDPNYHQKTDTLDHIDRTALGINGAGVAYAVGLYAQDLGGPNGVPVMADRTRHLIAKP

SEQ ID NO: 431 - DNA, 1587 bp, Mycobacterium tuberculosis
  CDS (4)..(1584)
taggccattcaacgctctgttcgtttgattggtcggtgggatgcgaaagctgcgcggcgacaggcgcggtctaatctgggcgcgatggtgaacaaatccaggatgatgccggcggtgctggccgtggctgtggtcgtcgcattcctgacgacgggctgtatccggtggtctacgcagtcgcggcccgttgttaacggccccgctgccgcagagttcgccgttgcgttgcgcaaccgggtgagcaccgacgcgatgatggcgcacctatcgaaactgcaggacatcgccaacgccaacgacggcactcgcgcggtgggcacccctggctatcaggccagcgtcgactatgtggtaaacacactgcgcaacagcggttttgatgtgcaaaccccggagttctccgctcgcgtgttcaaggccgaaaaaggggtggtgaccctcggcggcaacaccgtggaggcgagggcgctcgagtacagcctcggcacaccgccggacggggtgacgggcccgctggtggctgcccccgccgacgacagtccgggctgcagtccgtcggactacgacaggctgccggtgtccggtgcggtggtgctggtagatcgcggcgtctgtccttttgcccagaaggaagacgcagccgcgcagcgcggtgcggtggcgctgatcattgctgacaacatcgacgagcaggcgatgggcggcaccctgggggctaataccgacgtcaagatcccggtggtgagtgtcaccaagtcggtcggattccagctacgcggacagtctgggccaaccaccgtcaagctcacggcgagcacccaaagtttcaaggcccgcaacgtcatcgcgcagacgaagacggggtcgtcggccaacgtggtgatggcaggtgcgcatttggacagcgttccggaaggacccggcatcaacgacaacggctcgggagtggctgcggttctggaaacggcagtgcagctggggaactcaccgcatgtgtccaacgcggtacggttcgccttctggggcgccgaggaattcggcctgattgggtcacgaaactacgtcgagtcgctggacatcgacgcgctcaaaggcatcgcgctgtatctgaacttcgacatgttggcgtcgccgaacccgggttacttcacctacgacggtgaccagtcgctgccgctagacgcccgcggtcagccggtggtgcccgaaggctcggccggtatcgagcgcacgttcgtcgcctatctgaagatggccggcaagaccgcgcaggacacctcgttcgacggtcggtccgactacgacggcttcacgctggcgggtatcccttcgggtggcctgttctccggcgctgaggtcaagaagtccgccgagcaagccgagctctggggcggcaccgccgacgagcctttcgatcccaactatcaccagaagacagacaccctggaccatatcgaccgcaccgcgctcggtatcaacggcgctggcgtcgcgtacgcggtgggtttgtatgcgcaggacctcggcggccccaacggggttccggtcatggcggaccgcacccgccacctgattgccaaaccgtga

SEQ ID NO: 432 - protein, 527 aa, Mycobacterium tuberculosis
AIQRSVRLIGRWDAKAARRQARSNLGAMVNKSRMMPAVLAVAVVVAFLTTGCIRWSTQSRPVVNGPAAAEFAVALRNRVSTDAMMAHLSKLQDIANANDGTRAVGTPGYQASVDYVVNTLRNSGFDVQTPEFSARVFKAEKGVVTLGGNTVEARALEYSLGTPPDGVTGPLVAAPADDSPGCSPSDYDRLPVSGAVVLVDRGVCPFAQKEDAAAQRGAVALIIADNIDEQAMGGTLGANTDVKIPVVSVTKSVGFQLRGQSGPTTVKLTASTQSFKARNVIAQTKTGSSANVVMAGAHLDSVPEGPGINDNGSGVAAVLETAVQLGNSPHVSNAVRFAFWGAEEFGLIGSRNYVESLDIDALKGIALYLNFDMLASPNPGYFTYDGDQSLPLDARGQPVVPEGSAGIERTFVAYLKMAGKTAQDTSFDGRSDYDGFTLAGIPSGGLFSGAEVKKSAEQAELWGGTADEPFDPNYHQKTDTLDHIDRTALGINGAGVAYAVGLYAQDLGGPNGVPVMADRTRHLIAKP

SEQ ID NO: 433 - DNA, 390 bp, Mycobacterium tuberculosis
  CDS (1)..(180)
  CDS (184)..(279)
  CDS (283)..(390)
cgagacagtggtgcgggacacttgagttcggctgctaacgacgccagagtcgcccgcttccgcggtgtgggactcacgttcggtgagggtacagcggaccttcgagcacgcaatatcgtgggccggctggcaaccgtcggtttcgacgttggtgacgacccctcgttcatgaatcgttcttgagctccccgttttgctggatgcccaggcaccgccggtactgctgcgcttaagcttgtcgcacatggtgccggcagggaggaacagtgggcaagcagctagccgcgctcgccgcgctggtcggtgcgtgcatgctcgcagccggatgcaccaacgtggtcgacgggaccgccgtggctgccgacaaatccggaccactgcatcaggatc

SEQ ID NO: 434 - protein, 60 aa, Mycobacterium tuberculosis
RDSGAGHLSSAANDARVARFRGVGLTFGEGTADLRARNIVGRLATVGFDVGDDPSFMNRS

SEQ ID NO: 435 - protein, 32 aa, Mycobacterium tuberculosis
APRFAGCPGTAGTAALKLVAHGAGREEQWASS

SEQ ID NO: 436 - protein, 36 aa, Mycobacterium tuberculosis
PRSPRWSVRACSQPDAPTWSTGPPWLPTNPDHCIRI

SEQ ID NO: 437 - DNA, 389 bp, Mycobacterium tuberculosis
  CDS (1)..(21)
  CDS (25)..(168)
  CDS (172)..(387)
gagacagtggtgcgggacacttgagttcggctgctaacgacgccagagtcgcccgcttccgcggtgtgggactcacgttcggtgagggtacagcggaccttcgagcacgcaatatcgtgggccggctggcaaccgtcggtttcgacgttggtgacgacccctcgttcatgaatcgttcttgagctccccgttttgctggatgcccaggcaccgccggtactgctgcgcttaagcttgtcgcacatggtgccggcagggaggaacagtgggcaagcagctagccgcgctcgccgcgctggtcggtgcgtgcatgctcgcagccggatgcaccaacgtggtcgacgggaccgccgtggctgccgacaaatccggaccactgcatcaggatc

SEQ ID NO: 438 - protein, 7 aa, Mycobacterium tuberculosis
ETVVRDT

SEQ ID NO: 439 - protein, 48 aa, Mycobacterium tuberculosis
VRLLTTPESPASAVWDSRSVRVQRTFEHAISWAGWQPSVSTLVTTPRS

SEQ ID NO: 440 - protein, 72 aa, Mycobacterium tuberculosis
IVLELPVLLDAQAPPVLLRLSLSHMVPAGRNSGQAASRARRAGRCVHARSRMHQRGRRDRRGCRQIRTTASG

SEQ ID NO: 441 - DNA, 388 bp, Mycobacterium tuberculosis
  CDS (1)..(33)
  CDS (37)..(81)
  CDS (85)..(150)
  CDS (154)..(228)
  CDS (232)..(387)
agacagtggtgcgggacacttgagttcggctgctaacgacgccagagtcgcccgcttccgcggtgtgggactcacgttcggtgagggtacagcggaccttcgagcacgcaatatcgtgggccggctggcaaccgtcggtttcgacgttggtgacgacccctcgttcatgaatcgttcttgagctccccgttttgctggatgcccaggcaccgccggtactgctgcgcttaagcttgtcgcacatggtgccggcagggaggaacagtgggcaagcagctagccgcgctcgccgcgctggtcggtgcgtgcatgctcgcagccggatgcaccaacgtggtcgacgggaccgccgtggctgccgacaaatccggaccactgcatcaggatc

SEQ ID NO: 442 - protein, 11 aa, Mycobacterium tuberculosis
RQWCGTLEFGC

SEQ ID NO: 443 - protein, 15 aa, Mycobacterium tuberculosis
RRQSRPLPRCGTHVR

SEQ ID NO: 444 - protein, 22 aa, Mycobacterium tuberculosis
GYSGPSSTQYRGPAGNRRFRRW

SEQ ID NO: 445 - protein, 25 aa, Mycobacterium tuberculosis
RPLVHESFLSSPFCWMPRHRRYCCA

SEQ ID NO: 446 - protein, 52 aa, Mycobacterium tuberculosis
ACRTWCRQGGTVGKQLAALAALVGACMLAAGCTNVVDGTAVAADKSGPLHQD

SEQ ID NO: 447 - DNA, 325 bp, Mycobacterium tuberculosis
  CDS (1)..(18)
  CDS (22)..(87)
  CDS (91)..(165)
  CDS (169)..(324)
tgtgggactcacgttcggtgagggtacagcggaccttcgagcacgcaatatcgtgggccggctggcaaccgtcggtttcgacgttggtgacgacccctcgttcatgaatcgttcttgagctccccgttttgctggatgcccaggcaccgccggtactgctgcgcttaagcttgtcgcacatggtgccggcagggaggaacagtgggcaagcagctagccgcgctcgccgcgctggtcggtgcgtgcatgctcgcagccggatgcaccaacgtggtcgacgggaccgccgtggctgccgacaaatccggaccactgcatcaggatc

SEQ ID NO: 448 - protein, 6 aa, Mycobacterium tuberculosis
CGTHVR

SEQ ID NO: 449 - protein, 22 aa, Mycobacterium tuberculosis
GYSGPSSTQYRGPAGNRRFRRW

SEQ ID NO: 450 - protein, 25 aa, Mycobacterium tuberculosis
RPLVHESFLSSPFCWMPRHRRYCCA

SEQ ID NO: 451 - protein, 52 aa, Mycobacterium tuberculosis; identical to SEQ ID NO: 446

SEQ ID NO: 452 - DNA, 324 bp, Mycobacterium tuberculosis
  CDS (1)..(114)
  CDS (118)..(213)
  CDS (217)..(324)
gtgggactcacgttcggtgagggtacagcggaccttcgagcacgcaatatcgtgggccggctggcaaccgtcggtttcgacgttggtgacgacccctcgttcatgaatcgttcttgagctccccgttttgctggatgcccaggcaccgccggtactgctgcgcttaagcttgtcgcacatggtgccggcagggaggaacagtgggcaagcagctagccgcgctcgccgcgctggtcggtgcgtgcatgctcgcagccggatgcaccaacgtggtcgacgggaccgccgtggctgccgacaaatccggaccactgcatcaggatc

SEQ ID NO: 453 - protein, 38 aa, Mycobacterium tuberculosis
VGLTFGEGTADLRARNIVGRLATVGFDVGDDPSFMNRS

SEQ ID NO: 454 - protein, 32 aa, Mycobacterium tuberculosis; identical to SEQ ID NO: 435

SEQ ID NO: 455 - protein, 36 aa, Mycobacterium tuberculosis; identical to SEQ ID NO: 436

SEQ ID NO: 456 - DNA, 326 bp, Mycobacterium tuberculosis
  CDS (1)..(105)
  CDS (109)..(324)
gtgtgggactcacgttcggtgagggtacagcggaccttcgagcacgcaatatcgtgggccggctggcaaccgtcggtttcgacgttggtgacgacccctcgttcatgaatcgttcttgagctccccgttttgctggatgcccaggcaccgccggtactgctgcgcttaagcttgtcgcacatggtgccggcagggaggaacagtgggcaagcagctagccgcgctcgccgcgctggtcggtgcgtgcatgctcgcagccggatgcaccaacgtggtcgacgggaccgccgtggctgccgacaaatccggaccactgcatcaggatc

SEQ ID NO: 457 - protein, 35 aa, Mycobacterium tuberculosis
VWDSRSVRVQRTFEHAISWAGWQPSVSTLVTTPRS

SEQ ID NO: 458 - protein, 72 aa, Mycobacterium tuberculosis; identical to SEQ ID NO: 440

SEQ ID NO: 459 - DNA, 714 bp, Mycobacterium tuberculosis
  CDS (1)..(711)
atgggcaagcagctagccgcgctcgccgcgctggtcggtgcgtgcatgctcgcagccggatgcaccaacgtggtcgacgggaccgccgtggctgccgacaaatccggaccactgcatcaggatccgataccggtttcagcgcttgaagggctgcttctcgacttgagccagatcaatgccgcgctgggtgcgacatcgatgaaggtgtggttcaacgccaaggcaatgtgggactggagcaagagcgtggccgacaagaattgcctggctatcgacggtccagcacaggaaaaggtctatgccggcaccgggtggaccgctatgcgcggccaacggctggatgacagcatcgatgactccaagaaacgcgaccactacgccattcaagcggtcgtcggcttcccgaccgcacatgatgccgaggagttctacagctcctcggtgcaaagctggagcagctgctcgaaccgccggtttgtcgaagtcacccccggacaggacgacgccgcctggactgtggctgacgttgtcaacgacaacggcatgctcagtagctcgcaggttcaggaaggcggcgacggatggacctgccagcgtgccctgactgcgcgcaacaacgtcactatcgacattgtcacgtgcgcctatagccaaccggatttggtggcgattggcatcgctaaccaaatcgcggccaaggttgctaagcagtag

SEQ ID NO: 460 - protein, 237 aa, Mycobacterium tuberculosis
MGKQLAALAALVGACMLAAGCTNVVDGTAVAADKSGPLHQDPIPVSALEGLLLDLSQINAALGATSMKVWFNAKAMWDWSKSVADKNCLAIDGPAQEKVYAGTGWTAMRGQRLDDSIDDSKKRDHYAIQAVVGFPTAHDAEEFYSSSVQSWSSCSNRRFVEVTPGQDDAAWTVADVVNDNGMLSSSQVQEGGDGWTCQRALTARNNVTIDIVTCAYSQPDLVAIGIANQIAAKVAKQ

SEQ ID NO: 461 - DNA, 750 bp, Mycobacterium tuberculosis
  CDS (4)..(747)
taagcttgtcgcacatggtgccggcagggaggaacagtgggcaagcagctagccgcgctcgccgcgctggtcggtgcgtgcatgctcgcagccggatgcaccaacgtggtcgacgggaccgccgtggctgccgacaaatccggaccactgcatcaggatccgataccggtttcagcgcttgaagggctgcttctcgacttgagccagatcaatgccgcgctgggtgcgacatcgatgaaggtgtggttcaacgccaaggcaatgtgggactggagcaagagcgtggccgacaagaattgcctggctatcgacggtccagcacaggaaaaggtctatgccggcaccgggtggaccgctatgcgcggccaacggctggatgacagcatcgatgactccaagaaacgcgaccactacgccattcaagcggtcgtcggcttcccgaccgcacatgatgccgaggagttctacagctcctcggtgcaaagctggagcagctgctcgaaccgccggtttgtcgaagtcacccccggacaggacgacgccgcctggactgtggctgacgttgtcaacgacaacggcatgctcagtagctcgcaggttcaggaaggcggcgacggatggacctgccagcgtgccctgactgcgcgcaacaacgtcactatcgacattgtcacgtgcgcctatagccaaccggatttggtggcgattggcatcgctaaccaaatcgcggccaaggttgctaagcagtag

SEQ ID NO: 462 - protein, 248 aa, Mycobacterium tuberculosis
ACRTWCRQGGTVGKQLAALAALVGACMLAAGCTNVVDGTAVAADKSGPLHQDPIPVSALEGLLLDLSQINAALGATSMKVWFNAKAMWDWSKSVADKNCLAIDGPAQEKVYAGTGWTAMRGQRLDDSIDDSKKRDHYAIQAVVGFPTAHDAEEFYSSSVQSWSSCSNRRFVEVTPGQDDAAWTVADVVNDNGMLSSSQVQEGGDGWTCQRALTARNNVTIDIVTCAYSQPDLVAIGIANQIAAKVAKQ

SEQ ID NO: 463 - DNA, 390 bp, Mycobacterium tuberculosis
  CDS (1)..(66)
  CDS (70)..(81)
  CDS (85)..(153)
  CDS (157)..(318)
  CDS (322)..(390)
gtcctggtcgccgcgcaactggccggtcccgatggaaagtgttcacgatcgcgcttctgccgctggtagtggcgatggtgttagcaggattgcgggtcgaggctgcgatggccagcaccagcggcctgcggctggtcgccgcgcgcgccgaaatgatacccgcgatcacgaaatacatgtcggcgctggacgtcgccgtgctggccagctcgaccggacacgatgtggagggggcgcagaaaaacttcaccgcccgcaagtacgagctgcagacgcgactggccgacaccgacgtcatcgcagacgtgcggtcgggagtgaacacgctgctcaacggcggtcaggcgctgctggataagatgctggccgacagcatcggcttgcgggatc

SEQ ID NO: 464 - protein, 22 aa, Mycobacterium tuberculosis
VLVAAQLAGPDGKCSRSRFCRW

SEQ ID NO: 465 - protein, 4 aa, Mycobacterium tuberculosis
WRWC

SEQ ID NO: 466 - protein, 23 aa, Mycobacterium tuberculosis
QDCGSRLRWPAPAACGWSPRAPK

SEQ ID NO: 467 - protein, 54 aa, Mycobacterium tuberculosis
YPRSRNTCRRWTSPCWPARPDTMWRGRRKTSPPASTSCRRDWPTPTSSQTCGRE

SEQ ID NO: 468 - protein, 23 aa, Mycobacterium tuberculosis
TRCSTAVRRCWIRCWPTASACGI

SEQ ID NO: 469 - DNA, 389 bp, Mycobacterium tuberculosis
  CDS (1)..(354)
  CDS (358)..(387)
tcctggtcgccgcgcaactggccggtcccgatggaaagtgttcacgatcgcgcttctgccgctggtagtggcgatggtgttagcaggattgcgggtcgaggctgcgatggccagcaccagcggcctgcggctggtcgccgcgcgcgccgaaatgatacccgcgatcacgaaatacatgtcggcgctggacgtcgccgtgctggccagctcgaccggacacgatgtggagggggcgcagaaaaacttcaccgcccgcaagtacgagctgcagacgcgactggccgacaccgacgtcatcgcagacgtgcggtcgggagtgaacacgctgctcaacggcggtcaggcgctgctggataagatgctggccgacagcatcggcttgcgggatc

SEQ ID NO: 470 - protein, 118 aa, Mycobacterium tuberculosis
SWSPRNWPVPMESVHDRASAAGSGDGVSRIAGRGCDGQHQRPAAGRRARRNDTRDHEIHVGAGRRRAGQLDRTRCGGGAEKLHRPQVRAADATGRHRRHRRRAVGSEHAAQRRSGAAG

SEQ ID NO: 471 - protein, 10 aa, Mycobacterium tuberculosis
DAGRQHRLAG

SEQ ID NO: 472 - DNA, 388 bp, Mycobacterium tuberculosis
  CDS (1)..(387)
cctggtcgccgcgcaactggccggtcccgatggaaagtgttcacgatcgcgcttctgccgctggtagtggcgatggtgttagcaggattgcgggtcgaggctgcgatggccagcaccagcggcctgcggctggtcgccgcgcgcgccgaaatgatacccgcgatcacgaaatacatgtcggcgctggacgtcgccgtgctggccagctcgaccggacacgatgtggagggggcgcagaaaaacttcaccgcccgcaagtacgagctgcagacgcgactggccgacaccgacgtcatcgcagacgtgcggtcgggagtgaacacgctgctcaacggcggtcaggcgctgctggataagatgctggccgacagcatcggcttgcgggatc

SEQ ID NO: 473 - protein, 129 aa, Mycobacterium tuberculosis
PGRRATGRSRWKVFTIALLPLVVAMVLAGLRVEAAMASTSGLRLVAARAEMIPAITKYMSALDVAVLASSTGHDVEGAQKNFTARKYELQTRLADTDVIADVRSGVNTLLNGGQALLDKMLADSIGLRD

SEQ ID NO: 474 - DNA, 346 bp, Mycobacterium tuberculosis
  CDS (1)..(345)
acgatcgcgcttctgccgctggtagtggcgatggtgttagcaggattgcgggtcgaggctgcgatggccagcaccagcggcctgcggctggtcgccgcgcgcgccgaaatgatacccgcgatcacgaaatacatgtcggcgctggacgtcgccgtgctggccagctcgaccggacacgatgtggagggggcgcagaaaaacttcaccgcccgcaagtacgagctgcagacgcgactggccgacaccgacgtcatcgcagacgtgcggtcgggagtgaacacgctgctcaacggcggtcaggcgctgctggataagatgctggccgacagcatcggcttgcgggatc

SEQ ID NO: 475 - protein, 115 aa, Mycobacterium tuberculosis
TIALLPLVVAMVLAGLRVEAAMASTSGLRLVAARAEMIPAITKYMSALDVAVLASSTGHDVEGAQKNFTARKYELQTRLADTDVIADVRSGVNTLLNGGQALLDKMLADSIGLRD

SEQ ID NO: 476 - DNA, 345 bp, Mycobacterium tuberculosis
  CDS (1)..(21)
  CDS (25)..(36)
  CDS (40)..(108)
  CDS (112)..(273)
  CDS (277)..(345)
cgatcgcgcttctgccgctggtagtggcgatggtgttagcaggattgcgggtcgaggctgcgatggccagcaccagcggcctgcggctggtcgccgcgcgcgccgaaatgatacccgcgatcacgaaatacatgtcggcgctggacgtcgccgtgctggccagctcgaccggacacgatgtggagggggcgcagaaaaacttcaccgcccgcaagtacgagctgcagacgcgactggccgacaccgacgtcatcgcagacgtgcggtcgggagtgaacacgctgctcaacggcggtcaggcgctgctggataagatgctggccgacagcatcggcttgcgggatc

SEQ ID NO: 477 - protein, 7 aa, Mycobacterium tuberculosis
RSRFCRW

SEQ ID NO: 478 - protein, 4 aa, Mycobacterium tuberculosis
WRWC

SEQ ID NO: 479 - protein, 23 aa, Mycobacterium tuberculosis
QDCGSRLRWPAPAACGWSPRAPK

SEQ ID NO: 480 - protein, 54 aa, Mycobacterium tuberculosis; identical to SEQ ID NO: 467

SEQ ID NO: 481 - protein, 23 aa, Mycobacterium tuberculosis
TRCSTAVRRCWIRCWPTASACGI

SEQ ID NO: 482 - DNA, 347 bp, Mycobacterium tuberculosis
  CDS (1)..(312)
  CDS (316)..(345)
cacgatcgcgcttctgccgctggtagtggcgatggtgttagcaggattgcgggtcgaggctgcgatggccagcaccagcggcctgcggctggtcgccgcgcgcgccgaaatgatacccgcgatcacgaaatacatgtcggcgctggacgtcgccgtgctggccagctcgaccggacacgatgtggagggggcgcagaaaaacttcaccgcccgcaagtacgagctgcagacgcgactggccgacaccgacgtcatcgcagacgtgcggtcgggagtgaacacgctgctcaacggcggtcaggcgctgctggataagatgctggccgacagcatcggcttgcgggatc

SEQ ID NO: 483 - protein, 104 aa, Mycobacterium tuberculosis
HDRASAAGSGDGVSRIAGRGCDGQHQRPAAGRRARRNDTRDHEIHVGAGRRRAGQLDRTRCGGGAEKLHRPQVRAADATGRHRRHRRRAVGSEHAAQRRSGAAG

SEQ ID NO: 484 - protein, 10 aa, Mycobacterium tuberculosis
DAGRQHRLAG

SEQ ID NO: 485 - DNA, 2631 bp, Mycobacterium tuberculosis
  CDS (1)..(2628)
gtgaccatgttcgcccgcccgaccatcccggtcgcggcggccgcttctgatatttccgccccggctcaaccggcccgcggcaaacctcagcaacgcccgccgtcctggtcgccgcgcaactggccggtccgatggaaagtgttcacgatcgcgcttctgccgctggtagtggcgatggtgttagcaggattgcgggtcgaggctgcgatggccagcaccagcggcctgcggctggtcgccgcgcgcgccgaaatgatacccgcgatcacgaaatacatgtcggcgctggacgtcgccgtgctggccagctcgaccggacacgatgtggagggggcgcagaaaaacttcaccgcccgcaagtacgagctgcagacgcgactggccgacaccgacgtcatcgcagacgtgcggtcgggagtgaacacgctgctcaacggcggtcaggcgctgctggataaggtgctggccgacagcatcggcttgcgggatcgggtcaccgcctacgcgccgctgctgttgacggcccagaacgtgattgacgcgtcggtgcgggttgacagcgagcaaatccgaacccaggtgcagggtttgagccgagccgttggcgcccgcgggcagatgacgatgcaggagatcctggtgactcgcggcgccgaccttgccgagccgcaactgcgcagcgcgatggttaccctggccggcaccgaaccctcgacgctgttcgggatgagcgcggcgctcggtgcaggctcgccggacaccaagaacctgcagcagcaaatggtgaccaggatggcgatcatgtccgatccggccgttgcactggtcaacaacccagagctgctgcactcgatacagatcacccgcgacattgccgagcaggtgatcaccgacaccaccgaggcggtgacgaagtcggtgcaaagccaggccaccgaccggcgggatgccgcgattcgcgacgccgtgctggtgttggccgccatcgcgaccgcgatcgtcgtcgtgttggtggtggcgcgcacgctggtcgggccgatgcgggtactgcgtgatggggcgctcaaggttgctcataccgatctcgacggcgagatcgcggcggtccgcgccggcgacgagccgatccccgagccactggcggtgtacaccaccgaggaaatcggtcaggtcgcgcatgcggtcgacgagctgcacacccgggccctgttgctggccggcgaggaaacgcggttgcgactgctggtcaacgagatgtttgagaccatgtcgcggcgtagccgttccctggtcgaccagcagctgtcggtcatcgaccaactggagcgcaacgaggaggatcccgcccgactcgacagccttttccggctcgatcacctggccgcccggctgcgccgcaacagcgccaacctgctggtgctggccggtgcgcagattacccgtgaccaccgcgagccggtgccgctgtcaaccgtgatcagcgccgccgtgtcagaggtcgaggactatcgccgcgtcgacatcgcgagggtacccgactgtgcggtagtcggcgcagcggctggtggcgtcattcatctgcttgccgagctgatcgacaacgcgttgcgctactcgtcaccgaccacacccgttcgggttgccgccgcaatcggcagcgaaggcagtgttctgctgcgaatctcggattccggcctgggcatgaccgatgccgatcggcggatggccaatatgcggctgcgggccggcggtgaggtcaccccggatagtgcccggcacatgggtctgttcgtagtcggccggctggccggtcggcacggcatccgagtcgggctgcgcggtccggtgaccggtgaacagggcaccggcaccaccgccgaggtctacctgccgctagccgtgctcgaggggacggccccagcgcagccgccaaagccgcgggtatttgcgatcaagccgccgtgtcctgaacccgcggcggccgatccgacggacgttcccgccgccatcgggccgctaccaccggtcacgttgctcccgcgccgtaccccggggtccagtggcatcgccgacgtcccggcccagccgatgcagcagcggcggcgcgagctgaaaacaccctggtgggaggataggtttcaacaggagcccaaacaaccgcccgcaccagaaccgcgaccggcgccgccgcccgccaaacccgcgccaccggcgggcccggttgatgacgacgtcatctaccggcggatgctctccgagatggtgggtgacccgcacgagctggcccacagccccgatctggactggaagtcggtgtgggaccacggctggtcggcggccgccgaggccgcggacaagcccgtgcagtcccgcacggactacggcctgccggtgcgcgaacccggggcccggttagtgccgggggcggcggtgcctgagggacccgatcgggagcatccgggtgcagcgctagcatccaacggcggacttcatcccggccgagcgccgcggcacgcggctgcggtacgcgaccccgacgcggttcgtgcctccatcagcagccatttcggcggcgtgcgcaccgggcggtcgcatgcccgcgagagcagtcagggacccaatcagcaatga

SEQ ID NO: 486 - protein, 876 aa, Mycobacterium tuberculosis
VTMFARPTIPVAAAASDISAPAQPARGKPQQRPPSWSPRNWPVRWKVFTIALLPLVVAMVLAGLRVEAAMASTSGLRLVAARAEMIPAITKYMSALDVAVLASSTGHDVEGAQKNFTARKYELQTRLADTDVIADVRSGVNTLLNGGQALLDKVLADSIGLRDRVTAYAPLLLTAQNVIDASVRVDSEQIRTQVQGLSRAVGARGQMTMQEILVTRGADLAEPQLRSAMVTLAGTEPSTLFGMSAALGAGSPDTKNLQQQMVTRMAIMSDPAVALVNNPELLHSIQITRDIAEQVITDTTEAVTKSVQSQATDRRDAAIRDAVLVLAAIATAIVVVLVVARTLVGPMRVLRDGALKVAHTDLDGEIAAVRAGDEPIPEPLAVYTTEEIGQVAHAVDELHTRALLLAGEETRLRLLVNEMFETMSRRSRSLVDQQLSVIDQLERNEEDPARLDSLFRLDHLAARLRRNSANLLVLAGAQITRDHREPVPLSTVISAAVSEVEDYRRVDIARVPDCAVVGAAAGGVIHLLAELIDNALRYSSPTTPVRVAAAIGSEGSVLLRISDSGLGMTDADRRMANMRLRAGGEVTPDSARHMGLFVVGRLAGRHGIRVGLRGPVTGEQGTGTTAEVYLPLAVLEGTAPAQPPKPRVFAIKPPCPEPAAADPTDVPAAIGPLPPVTLLPRRTPGSSGIADVPAQPMQQRRRELKTPWWEDRFQQEPKQPPAPEPRPAPPPAKPAPPAGPVDDDVIYRRMLSEMVGDPHELAHSPDLDWKSVWDHGWSAAAEAADKPVQSRTDYGLPVREPGARLVPGAAVPEGPDREHPGAALASNGGLHPGRAPRHAAAVRDPDAVRASISSHFGGVRTGRSHARESSQGPNQQ

SEQ ID NO: 487 - DNA, 2664 bp, Mycobacterium tuberculosis
  CDS (4)..(2661)
taagggtgcggccggtggcacggccgcggccacgtgaccatgttcgcccgcccgaccatcccggtcgcggcggccgcttctgatatttccgccccggctcaaccggcccgcggcaaacctcagcaacgcccgccgtcctggtcgccgcgcaactggccggtccgatggaaagtgttcacgatcgcgcttctgccgctggtagtggcgatggtgttagcaggattgcgggtcgaggctgcgatggccagcaccagcggcctgcggctggtcgccgcgcgcgccgaaatgatacccgcgatcacgaaatacatgtcggcgctggacgtcgccgtgctggccagctcgaccggacacgatgtggagggggcgcagaaaaacttcaccgcccgcaagtacgagctgcagacgcgactggccgacaccgacgtcatcgcagacgtgcggtcgggagtgaacacgctgctcaacggcggtcaggcgctgctggataaggtgctggccgacagcatcggcttgcgggatcgggtcaccgcctacgcgccgctgctgttgacggcccagaacgtgattgacgcgtcggtgcgggttgacagcgagcaaatccgaacccaggtgcagggtttgagccgagccgttggcgcccgcgggcagatgacgatgcaggagatcctggtgactcgcggcgccgaccttgccgagccgcaactgcgcagcgcgatggttaccctggccggcaccgaaccctcgacgctgttcgggatgagcgcggcgctcggtgcaggctcgccggacaccaagaacctgcagcagcaaatggtgaccaggatggcgatcatgtccgatccggccgttgcactggtcaacaacccagagctgctgcactcgatacagatcacccgcgacattgccgagcaggtgatcaccgacaccaccgaggcggtgacgaagtcggtgcaaagccaggccaccgaccggcgggatgccgcgattcgcgacgccgtgctggtgttggccgccatcgcgaccgcgatcgtcgtcgtgttggtggtggcgcgcacgctggtcgggccgatgcgggtactgcgtgatggggcgctcaaggttgctcataccgatctcgacggcgagatcgcggcggtccgcgccggcgacgagccgatccccgagccactggcggtgtacaccaccgaggaaatcggtcaggtcgcgcatgcggtcgacgagctgcacacccgggccctgttgctggccggcgaggaaacgcggttgcgactgctggtcaacgagatgtttgagaccatgtcgcggcgtagccgttccctggtcgaccagcagctgtcggtcatcgaccaactggagcgcaacgaggaggatcccgcccgactcgacagccttttccggctcgatcacctggccgcccggctgcgccgcaacagcgccaacctgctggtgctggccggtgcgcagattacccgtgaccaccgcgagccggtgccgctgtcaaccgtgatcagcgccgccgtgtcagaggtcgaggactatcgccgcgtcgacatcgcgagggtacccgactgtgcggtagtcggcgcagcggctggtggcgtcattcatctgcttgccgagctgatcgacaacgcgttgcgctactcgtcaccgaccacacccgttcgggttgccgccgcaatcggcagcgaaggcagtgttctgctgcgaatctcggattccggcctgggcatgaccgatgccgatcggcggatggccaatatgcggctgcgggccggcggtgaggtcaccccggatagtgcccggcacatgggtctgttcgtagtcggccggctggccggtcggcacggcatccgagtcgggctgcgcggtccggtgaccggtgaacagggcaccggcaccaccgccgaggtctacctgccgctagccgtgctcgaggggacggccccagcgcagccgccaaagccgcgggtatttgcgatcaagccgccgtgtcctgaacccgcggcggccgatccgacggacgttcccgccgccatcgggccgctaccaccggtcacgttgctcccgcgccgtaccccggggtccagtggcatcgccgacgtcccggcccagccgatgcagcagcggcggcgcgagctgaaaacaccctggtgggaggataggtttcaacaggagcccaaacaaccgcccgcaccagaaccgcgaccggcgccgccgcccgccaaacccgcgccaccggcgggcccggttgatgacgacgtcatctaccggcggatgctctccgagatggtgggtgacccgcacgagctggcccacagccccgatctggactggaagtcggtgtgggaccacggctggtcggcggccgccgaggccgcggacaagcccgtgcagtcccgcacggactacggcctgccggtgcgcgaacccggggcccggttagtgccgggggcggcggtgcctgagggacccgatcgggagcatccgggtgcagcgctagcatccaacggcggacttcatcccggccgagcgccgcggcacgcggctgcggtacgcgaccccgacgcggttcgtgcctccatcagcagccatttcggcggcgtgcgcaccgggcggtcgcatgcccgcgagagcagtcagggacccaatcagcaatga

SEQ ID NO: 488 - protein, 886 aa, Mycobacterium tuberculosis
GCGRWHGRGHVTMFARPTIPVAAAASDISAPAQPARGKPQQRPPSWSPRNWPVRWKVFTIALLPLVVAMVLAGLRVEAAMASTSGLRLVAARAEMIPAITKYMSALDVAVLASSTGHDVEGAQKNFTARKYELQTRLADTDVIADVRSGVNTLLNGGQALLDKVLADSIGLRDRVTAYAPLLLTAQNVIDASVRVDSEQIRTQVQGLSRAVGARGQMTMQEILVTRGADLAEPQLRSAMVTLAGTEPSTLFGMSAALGAGSPDTKNLQQQMVTRMAIMSDPAVALVNNPELLHSIQITRDIAEQVITDTTEAVTKSVQSQATDRRDAAIRDAVLVLAAIATAIVVVLVVARTLVGPMRVLRDGALKVAHTDLDGEIAAVRAGDEPIPEPLAVYTTEEIGQVAHAVDELHTRALLLAGEETRLRLLVNEMFETMSRRSRSLVDQQLSVIDQLERNEEDPARLDSLFRLDHLAARLRRNSANLLVLAGAQITRDHREPVPLSTVISAAVSEVEDYRRVDIARVPDCAVVGAAAGGVIHLLAELIDNALRYSSPTTPVRVAAAIGSEGSVLLRISDSGLGMTDADRRMANMRLRAGGEVTPDSARHMGLFVVGRLAGRHGIRVGLRGPVTGEQGTGTTAEVYLPLAVLEGTAPAQPPKPRVFAIKPPCPEPAAADPTDVPAAIGPLPPVTLLPRRTPGSSGIADVPAQPMQQRRRELKTPWWEDRFQQEPKQPPAPEPRPAPPPAKPAPPAGPVDDDVIYRRMLSEMVGDPHELAHSPDLDWKSVWDHGWSAAAEAADKPVQSRTDYGLPVREPGARLVPGAAVPEGPDREHPGAALASNGGLHPGRAPRHAAAVRDPDAVRASISSHFGGVRTGRSHARESSQGPNQQ

SEQ ID NO: 489 - DNA, 420 bp, Mycobacterium tuberculosis
  CDS (1)..(120)
  CDS (124)..(192)
  CDS (196)..(333)
  CDS (337)..(381)
  CDS (385)..(420)
ctacgacaaggcaaaggagcacagggtgaagcgtggactgacggtcgcggtagccggagccgccattctggtcgcaggtctttccggatgttcaagcaacaagtcgactacaggaagcggtgagaccacgaccgcggcaggcacgacggcaagccccggcgccgcatccgggccgaaggtcgtcatcgacggtaaggaccagaacgtcaccgggtctgtggtgtgcacaaccgcggccggcaatgtcaacatcgcgatcggcggggcggcgaccggcattgccgccgtgctcaccgacggcaaccctccggaggtgaagtccgttgggctcggtaacgtcaacggcgtcacgctgggatacacgtcgggcaccggacagggtaacgctcggcaaccaaggacggcagccactacaagatc

SEQ ID NO: 490 - protein, 40 aa, Mycobacterium tuberculosis
LRQGKGAQGEAWTDGRGSRSRHSGRRSFRMFKQQVDYRKR

SEQ ID NO: 491 - protein, 23 aa, Mycobacterium tuberculosis
DHDRGRHDGKPRRRIRAEGRHRR

SEQ ID NO: 492 - protein, 46 aa, Mycobacterium tuberculosis
GPERHRVCGVHNRGRQCQHRDRRGGDRHCRRAHRRQPSGGEVRWAR

SEQ ID NO: 493 - protein, 15 aa, Mycobacterium tuberculosis
RQRRHAGIHVGHRTG

SEQ ID NO: 494 - protein, 12 aa, Mycobacterium tuberculosis
RSATKDGSHYKI

SEQ ID NO: 495 - DNA, 419 bp, Mycobacterium tuberculosis
  CDS (1)..(417)
tacgacaaggcaaaggagcacagggtgaagcgtggactgacggtcgcggtagccggagccgccattctggtcgcaggtctttccggatgttcaagcaacaagtcgactacaggaagcggtgagaccacgaccgcggcaggcacgacggcaagccccggcgccgcatccgggccgaaggtcgtcatcgacggtaaggaccagaacgtcaccgggtctgtggtgtgcacaaccgcggccggcaatgtcaacatcgcgatcggcggggcggcgaccggcattgccgccgtgctcaccgacggcaaccctccggaggtgaagtccgttgggctcggtaacgtcaacggcgtcacgctgggatacacgtcgggcaccggacagggtaacgctcggcaaccaaggacggcagccactacaagatc

SEQ ID NO: 496 - protein, 139 aa, Mycobacterium tuberculosis
YDKAKEHRVKRGLTVAVAGAAILVAGLSGCSSNKSTTGSGETTTAAGTTASPGAASGPKVVIDGKDQNVTGSVVCTTAAGNVNIAIGGAATGIAAVLTDGNPPEVKSVGLGNVNGVTLGYTSGTGQGNARQPRTAATTR

SEQ ID NO: 497 - DNA, 418 bp, Mycobacterium tuberculosis
  CDS (1)..(24)
  CDS (28)..(36)
  CDS (40)..(48)
  CDS (52)..(312)
  CDS (316)..(417)
acgacaaggcaaaggagcacagggtgaagcgtggactgacggtcgcggtagccggagccgccattctggtcgcaggtctttccggatgttcaagcaacaagtcgactacaggaagcggtgagaccacgaccgcggcaggcacgacggcaagccccggcgccgcatccgggccgaaggtcgtcatcgacggtaaggaccagaacgtcaccgggtctgtggtgtgcacaaccgcggccggcaatgtcaacatcgcgatcggcggggcggcgaccggcattgccgccgtgctcaccgacggcaaccctccggaggtgaagtccgttgggctcggtaacgtcaacggcgtcacgctgggatacacgtcgggcaccggacagggtaacgctcggcaaccaaggacggcagccactacaagatc

SEQ ID NO: 498 - protein, 8 aa, Mycobacterium tuberculosis
TTRQRSTG

SEQ ID NO: 499 - protein, 87 aa, Mycobacterium tuberculosis
PEPPFWSQVFPDVQATSRLQEAVRPRPRQARRQAPAPHPGRRSSSTVRTRTSPGLWCAQPRPAMSTSRSAGRRPALPPCSPTATLRR

SEQ ID NO: 500 - protein, 34 aa, Mycobacterium tuberculosis
SPLGSVTSTASRWDTRRAPDRVTLGNQGRQPLQD

SEQ ID NO: 501 - DNA, 597 bp, Mycobacterium tuberculosis
  CDS (1)..(90)
  CDS (94)..(297)
  CDS (301)..(597)
gcacaaccgcggccggcaatgtcaacatcgcgatcggcggggcggcgaccggcattgccgccgtgctcaccgacggcaaccctccggaggtgaagtccgttgggctcggtaacgtcaacggcgtcacgctgggatacacgtcgggcaccggacagggtaacgcctcggcaaccaaggacggcagccactacaagatcacagggtgaagcgtggactgacggtcgcggtagccggagccgccattctggtcgcaggtctttccggatgttcaagcaacaagtcgactacaggaagcggtgagaccacgaccgcggcaggcacgacggcaagccccggcgccgctccgggccgaaggtcgtcatcgacggtaaggaccagaacgtcaccggctccgtggtgtgcacaaccgcggccggcaatgtcaacatcgcgatcggcggggcggcgaccggcattgccgccgtgctcaccgacggcaaccctccggaggtgaagtccgttgggctcggtaacgtcaacggcgtcacgctgggatacacgtcgggcaccggacagggtaacgcctcggcaaccaaggacggcagccactacaagatc

SEQ ID NO: 502 - protein, 30 aa, Mycobacterium tuberculosis
AQPRPAMSTSRSAGRRPALPPCSPTATLRR

SEQ ID NO: 503 - protein, 68 aa, Mycobacterium tuberculosis
SPLGSVTSTASRWDTRRAPDRVTPRQPRTAATTRSQGEAWTDGRGSRSRHSGRRSFRMFKQQVDYRKR

SEQ ID NO: 504 - protein, 99 aa, Mycobacterium tuberculosis
DHDRGRHDGKPRRRSGPKVVIDGKDQNVTGSVVCTTAAGNVNIAIGGAATGIAAVLTDGNPPEVKSVGLGNVNGVTLGYTSGTGQGNASATKDGSHYKI

SEQ ID NO: 505 - DNA, 596 bp, Mycobacterium tuberculosis
  CDS (1)..(108)
  CDS (112)..(156)
  CDS (160)..(489)
  CDS (493)..(594)
cacaaccgcggccggcaatgtcaacatcgcgatcggcggggcggcgaccggcattgccgccgtgctcaccgacggcaaccctccggaggtgaagtccgttgggctcggtaacgtcaacggcgtcacgctgggatacacgtcgggcaccggacagggtaacgcctcggcaaccaaggacggcagccactacaagatcacagggtgaagcgtggactgacggtcgcggtagccggagccgccattctggtcgcaggtctttccggatgttcaagcaacaagtcgactacaggaagcggtgagaccacgaccgcggcaggcacgacggcaagccccggcgccgctccgggccgaaggtcgtcatcgacggtaaggaccagaacgtcaccggctccgtggtgtgcacaaccgcggccggcaatgtcaacatcgcgatcggcggggcggcgaccggcattgccgccgtgctcaccgacggcaaccctccggaggtgaagtccgttgggctcggtaacgtcaacggcgtcacgctgggatacacgtcgggcaccggacagggtaacgcctcggcaaccaaggacggcagccactacaagatc

SEQ ID NO: 506 - protein, 36 aa, Mycobacterium tuberculosis
HNRGRQCQHRDRRGGDRHCRRAHRRQPSGGEVRWAR

SEQ ID NO: 507 - protein, 15 aa, Mycobacterium tuberculosis
RQRRHAGIHVGHRTG

SEQ ID NO: 508 - protein, 110 aa, Mycobacterium tuberculosis
RLGNQGRQPLQDHRVKRGLTVAVAGAAILVAGLSGCSSNKSTTGSGETTTAAGTTASPGAAPGRRSSSTVRTRTSPAPWCAQPRPAMSTSRSAGRRPALPPCSPTATLRR

SEQ ID NO: 509 - protein, 34 aa, Mycobacterium tuberculosis
SPLGSVTSTASRWDTRRAPDRVTPRQPRTAATTR

SEQ ID NO: 510 - DNA, 595 bp, Mycobacterium tuberculosis
  CDS (1)..(201)
  CDS (205)..(213)
  CDS (217)..(225)
  CDS (229)..(366)
  CDS (370)..(507)
  CDS (511)..(594)
acaaccgcggccggcaatgtcaacatcgcgatcggcggggcggcgaccggcattgccgccgtgctcaccgacggcaaccctccggaggtgaagtccgttgggctcggtaacgtcaacggcgtcacgctgggatacacgtcgggcaccggacagggtaacgcctcggcaaccaaggacggcagccactacaagatcacagggtgaagcgtggactgacggtcgcggtagccgcagccgccattctggtcgcaggtctttccggatgttcaagcaacaagtcgactacaggaagcggtgagaccacgaccgcggcaggcacgacggcaagccccggcgccgctccgggccgaaggtcgtcatcgacggtaaggaccagaacgtcaccggctccgtggtgtgcacaaccgcggccggcaatgtcaacatcgcgatcggcggggcggcgaccggcattgccgccgtgctcaccgacggcaaccctccggaggtgaagtccgttgggctcggtaacgtcaacggcgtcacgctgggatacacgtcgggcaccggacagggtaacgcctcggcaaccaaggacggcagccactacaagatc

SEQ ID NO: 511 - protein, 67 aa, Mycobacterium tuberculosis
TTAAGNVNIAIGGAATGIAAVLTDGNPPEVKSVGLGNVNGVTLGYTSGTGQGNASATKDGSHYKITG

SEQ ID NO: 512 - protein, 46 aa, Mycobacterium tuberculosis
PQPPFWSQVFPDVQATSRLQEAVRPRPRQARRQAPAPLRAEGRHRR

SEQ ID NO: 513 - protein, 46 aa, Mycobacterium tuberculosis
GPERHRLRGVHNRGRQCQHRDRRGGDRHCRRAHRRQPSGGEVRWAR

SEQ ID NO: 514 - protein, 15 aa, Mycobacterium tuberculosis
RQRRHAGIHVGHRTG

SEQ ID NO: 515 - protein, 12 aa, Mycobacterium tuberculosis
RLGNQGRQPLQD

SEQ ID NO: 516 - DNA, 420 bp, Mycobacterium tuberculosis
  CDS (1)..(20)
  CDS (24)..(420)
ctaacgacaggcaaaggagcacagggtgaagcgtggactgacggtcgcggtagccggagccgccattctggtcgcaggtctttccggatgttcaagcaacaagtcgactacaggaagcggtgagaccacgaccgcggcaggcacgacggcaagccccggcgccgctccgggccgaaggtcgtcatcgacggtaaggaccagaacgtcaccggctccgtggtgtgcacaaccgcggccggcaatgtcaacatcgcgatcggcggggcggcgaccggcattgccgccgtgctcaccgacggcaaccctccggaggtgaagtccgttgggctcggtaacgtcaacggcgtcacgctgggatacacgtcgggcaccggacagggtaacgcctcggcaaccaaggacggcagccactacaagatc

SEQ ID NO: 517 - protein, 40 aa, Mycobacterium tuberculosis
LTTGKGAQGEAWTDGRGSRSRHSGRRSFRMFKQQVDYRKR

SEQ ID NO: 518 - protein, 99 aa, Mycobacterium tuberculosis; identical to SEQ ID NO: 504

SEQ ID NO: 519 - DNA, 419 bp, Mycobacterium tuberculosis
  CDS (4)..(417)
taacgacaggcaaaggagcacagggtgaagcgtggactgacggtcgcggtagccggagccgccattctggtcgcaggtctttccggatgttcaagcaacaagtcgactacaggaagcggtgagaccacgaccgcggcaggcacgacggcaagccccggcgccgctccgggccgaaggtcgtcatcgacggtaaggaccagaacgtcaccggctccgtggtgtgcacaaccgcggccggcaatgtcaacatcgcgatcggcggggcggcgaccggcattgccgccgtgctcaccgacggcaaccctccggaggtgaagtccgttgggctcggtaacgtcaacggcgtcacgctgggatacacgtcgggcaccggacagggtaacgcctcggcaaccaaggacggcagccactacaagatc

SEQ ID NO: 520 - protein, 103 aa, Mycobacterium tuberculosis
RQAKEHRVKRGLTVAVAGAAILVAGLSGCSSNKSTTGSGETTTAAGTTASPGAAPGRRSSSTVRTRTSPAPWCAQPRPAMSTSRSAGRRPALPPCSPTATLRR

SEQ ID NO: 521 - protein, 34 aa, Mycobacterium tuberculosis; identical to SEQ ID NO: 509

SEQ ID NO: 522 - DNA, 418 bp, Mycobacterium tuberculosis
  CDS (1)..(24)
  CDS (28)..(36)
  CDS (40)..(48)
  CDS (52)..(189)
  CDS (193)..(330)
  CDS (334)..(378)
  CDS (382)..(417)
aacgacaggcaaaggagcacagggtgaagcgtggactgacggtcgcggtagccggagccgccattctggtcgcaggtctttccggatgttcaagcaacaagtcgactacaggaagcggtgagaccacgaccgcggcaggcacgacggcaagccccggcgccgctccgggccgaaggtcgtcatcgacggtaaggaccagaacgtcaccggctccgtggtgtgcacaaccgcggccggcaatgtcaacatcgcgatcggcggggcggcgaccggcattgccgccgtgctcaccgacggcaaccctccggaggtgaagtccgttgggctcggtaacgtcaacggcgtcacgctgggatacacgtcgggcaccggacagggtaacgcctcggcaaccaaggacggcagccactacaagatc

SEQ ID NO: 523 - protein, 8 aa, Mycobacterium tuberculosis
NDRQRSTG

SEQ ID NO: 524 - protein, 46 aa, Mycobacterium tuberculosis
PEPPFWSQVFPDVQATSRLQEAVRPRPRQARRQAPAPLRAEGRHRR

SEQ ID NO: 525 - protein, 46 aa, Mycobacterium tuberculosis; identical to SEQ ID NO: 513

SEQ ID NO: 526 - protein, 15 aa, Mycobacterium tuberculosis
RQRRHAGIHVGHRTG

SEQ ID NO: 527 - protein, 12 aa, Mycobacterium tuberculosis
RLGNQGRQPLQD

SEQ ID NO: 528 - DNA, 18 bp, Mycobacterium tuberculosis
acgcggcgcagcctgttg

SEQ ID NO: 529 - DNA, 18 bp, Mycobacterium tuberculosis
cgaccttgggattcgcct

SEQ ID NO: 530 - DNA, 451 bp, Mycobacterium tuberculosis
  CDS (1)..(33)
  CDS (37)..(42)
  CDS (46)..(57)
  CDS (61)..(450)
cctaccagcaagagcccagggcttcacaggacctaaaaggagtagcgcccatgggcttgatccaattttccttccgccccgtgcaataccatctgcaagaccagcgacggcccgtggttgcggtcgcgcagcttgcggaaacggggtatggaccctgccgtaccgttgttgccacttgatgtcgtcgctctccacccgtcggggggcgaaagccattccgacactgggatcctcaaaacgtcggctgagtgtctgcagggctccggggagcagccgatcatcaccatgtacgaactgaataagtcccccccgcgcgacttccagacatttgttgtggtttcggttgaggccgaggcgaggctcatttcgcagcaagcggtctccgggtcgcagcatcgttgcggcgatcgcggcgcagtcgtcggacgagtcgtcgtcaacgaccacgatc

SEQ ID NO: 531 - protein, 11 aa, Mycobacterium tuberculosis
PTSKSPGLHRT

SEQ ID NO: 532 - protein, 4 aa, Mycobacterium tuberculosis
RPWA

SEQ ID NO: 533 - protein, 130 aa, Mycobacterium tuberculosis
SNFPSAPCNTICKTSDGPWLRSRSLRKRGMDPAVPLLPLDVVALHPSGGESHSDTGILKTSAECLQGSGEQPIITMYELNKSPPRDFQTFVVVSVEAEARLISQQAVSGSQHRCGDRGAVVGRVVVNDHD

SEQ ID NO: 534 - DNA, 450 bp, Mycobacterium tuberculosis
  CDS (1)..(294)
  CDS (298)..(450)
ctaccagcaagagcccagggcttcacaggacctaaaaggagtagcgcccatgggcttgatccaattttccttccgccccgtgcaataccatctgcaagaccagcgacggcccgtggttgcggtcgcgcagcttgcggaaacggggtatggaccctgccgtaccgttgttgccacttgatgtcgtcgctctccacccgtcggggggcgaaagccattccgacactgggatcctcaaaacgtcggctgagtgtctgcagggctccggggagcagccgatcatcaccatgtacgaactgaataagtcccccccgcgcgacttccagacatttgttgtggtttcggttgaggccgaggcgaggctcatttcgcagcaagcggtctccgggtcgcagcatcgttgcggcgatcgcggcgcagtcgtcggacgagtcgtcgtcaacgaccacgatc

SEQ ID NO: 535 - protein, 98 aa, Mycobacterium tuberculosis
LPARAQGFTGPKRSSAHGLDPIFLPPRAIPSARPATARGCGRAACGNGVWTLPYRCCHLMSSLSTRRGAKAIPTLGSSKRRLSVCRAPGSSRSSPCTN

SEQ ID NO: 536 - protein, 51 aa, Mycobacterium tuberculosis
ISPPRATSRHLLWFRLRPRRGSFRSKRSPGRSIVAAIAAQSSDESSSTTTI

SEQ ID NO: 537 - DNA, 449 bp, Mycobacterium tuberculosis
  CDS (1)..(174)
  CDS (178)..(243)
  CDS (247)..(297)
  CDS (301)..(342)
  CDS (346)..(447)
taccagcaagagcccagggcttcacaggacctaaaaggagtagcgcccatgggcttgatccaattttccttccgccccgtgcaataccatctgcaagaccagcgacggcccgtggttgcggtcgcgcagcttgcggaaacggggtatggaccctgccgtaccgttgttgccacttgatgtcgtcgctctccacccgtcggggggcgaaagccattccgacactgggatcctcaaaacgtcggctgagtgtctgcagggctccggggagcagccgatcatcaccatgtacgaactgaataagtcccccccgcgcgacttccagacatttgttgtggtttcggttgaggccgaggcgaggctcatttcgcagcaagcggtctccgggtcgcagcatcgttgcggcgatcgcggcgcagtcgtcggacgagtcgtcgtcaacgaccacgatc

SEQ ID NO: 538 - protein, 58 aa, Mycobacterium tuberculosis
YQQEPRASQDLKGVAPMGLIQFSFRPVQYHLQDQRRPVVAVAQLAETGYGPCRTVVAT

SEQ ID NO: 539 - protein, 22 aa, Mycobacterium tuberculosis
CRRSPPVGGRKPFRHWDPQNVG

SEQ ID NO: 540 - protein, 17 aa, Mycobacterium tuberculosis
VSAGLRGAADHHHVRTE

SEQ ID NO: 541 - protein, 14 aa, Mycobacterium tuberculosis
VPPARLPDICCGFG

SEQ ID NO: 542 - protein, 34 aa, Mycobacterium tuberculosis; identical to SEQ ID NO: 71

SEQ ID NO: 543 - protein, 136 aa, Mycobacterium tuberculosis; identical to SEQ ID NO: 32

SEQ ID NO: 544 - DNA, 714 bp, Mycobacterium tuberculosis
gtgggcaagcagctagccgcgctcgccgcgctggtcggtgcgtgcatgctcgcagccggatgcaccaacgtggtcgacgggaccgccgtggctgccgacaaatccggaccactgcatcaggatccgataccggtttcagcgcttgaagggctgcttctcgacttgagccagatcaatgccgcgctgggtgcgacatcgatgaaggtgtggttcaacgccaaggcaatgtgggactggagcaagagcgtggccgacaagaattgcctggctatcgacggtccagcacaggaaaaggtctatgccggcaccgggtggaccgctatgcgcggccaacggctggatgacagcatcgatgactccaagaaacgcgaccactacgccattcaagcggtcgtcggcttcccgaccgcacatgatgccgaggagttctacagctcctcggtgcaaagctggagcagctgctcgaaccgccggtttgtcgaagtcacccccggacaggacgacgccgcctggactgtggctgacgttgtcaacgacaacggcatgctcagtagctcgcaggttcaggaaggcggcgacggatggacctgccagcgtgccctgactgcgcgcaacaacgtcactatcgacattgtcacgtgcgcctatagccaaccggatttggtggcgattggcatcgctaaccaaatcgcggccaaggttgctaagcagtag

SEQ ID NO: 545 - protein, 245 aa, Mycobacterium tuberculosis
MGKQLAALAALVGACMLAAGCTNVVDGTAVAADKSGPLHQDPIPVFTSALEGLLLDLSQINAALGATSMKVWFNAKAMWDWSKSVADKNCLAIDGPAQEKVYAGTGFTWTAMRGQRLDDSIDDSKKRDHYAIQAVVGFPTAHDAEEFYSSSVQSWSSCSNRRFVEVTFTPGQDDAAWTVADVVNDNGMLSSSQVQEGGDGWTCQRALTARNNVTIDIVTCAYSQPDLVFTAIGIANQIAAKVAKQ

SEQ ID NO: 546 - DNA, 220 bp, Mycobacterium tuberculosis
  CDS (1)..(54)
  CDS (58)..(99)
  CDS (104)..(219)
aggcgaatacccgcgagggcagcgcgacggcggccctgccggcgccgtggctgctgaacaacacatcccagccgcgcacgcttccggtatgcggcaggataaacgaccccaacagcacgaacaccaggattgcgacaaccaaagccctcgcgcctggctcgatttcgcgcgcaacgcggcgttctgccgcctcgatctcagcgcggagggcgtcgagatc

SEQ ID NO: 547 - protein, 18 aa, Mycobacterium tuberculosis
RRIPARAARRRPCRRRGC

SEQ ID NO: 548 - protein, 14 aa, Mycobacterium tuberculosis
TTHPSRARFRYAAG

SEQ ID NO: 549 - protein, 39 aa, Mycobacterium tuberculosis
TTPTARTPGLRQPKPSRLARFRAQRGVLPPRSQRGGRRD

SEQ ID NO: 550 - DNA, 219 bp, Mycobacterium tuberculosis
  CDS (1)..(219)
ggcgaatacccgcgagggcagcgcgacggcggccctgccggcgccgtggctgctgaacaacacatcccagccgcgcacgcttccggtatgcggcaggataaacgaccccaacagcacgaacaccaggattgcgacaaccaaagccctcgcgcctggctcgatttcgcgcgcaacgcggcgttctgccgcctcgatctcagcgcggagggcgtcgagatc

SEQ ID NO: 551 - protein, 73 aa, Mycobacterium tuberculosis
GEYPRGQRDGGPAGAVAAEQHIPAAHASGMRQDKRPQQHEHQDCDNQSPRAWLDFARNAAFCRLDLSAEGVEI

SEQ ID NO: 552 - DNA, 218 bp, Mycobacterium tuberculosis
  CDS (1)..(216)
gcgaatacccgcgagggcagcgcgacggcggccctgccggcgccgtggctgctgaacaacacatcccagccgcgcacgcttccggtatgcggcaggataaacgaccccaacagcacgaacaccaggattgcgacaaccaaagccctcgcgcctggctcgatttcgcgcgcaacgcggcgttctgccgcctcgatctcagcgcggagggcgtcgagatc

SEQ ID NO: 553 - protein, 72 aa, Mycobacterium tuberculosis
ANTREGSATAALPAPWLLNNTSQPRTLPVCGRINDPNSTNTRIATTKALAPGSISRATRRSAASISARRASR

SEQ ID NO: 554 - DNA, 813 bp, Mycobacterium tuberculosis
  CDS (4)..(810)
taaacgaccccaacagcacgaacaccaggattgcgacaaccaaagccctcgcgcctggctcgatttcgcgcgcaacgcggcgttctgccgcctcgatctcagcgcggagggcgtcgagatccccggcgtcgtgttcgtggctcatcatctgcatcctccgggcttggccgcgctgaccggcagcccgaccccaggcatgcccaggccgacggcgcgccccggctgcccggcggtgtgcgcgtcgccggcgcgggtgcggcggtgggtcaggacgccggcgtcggcgatgaggtggtgcggcgccgcttcggtgaccttcgtggtgatgacgtcgccgggacgcacgcgcggctggccggcggtgaagtgcaccaggcgcccgtcgcgcgcccgcccgctcatgcgcgccgtgacggtgtccttgcgcccttccccggtggccaccagcacctcgacggcctgcccgaccagggcgcggttggcttccagcgagatttgctcctgcagcgcgatcaggcgttcatagcgttcctgcacaacggctttcggcagctgtccgtcgagttgcgcggccggtgtcccgggccgcttggagtattggaaggtaaatgcggccgcgaagcgggcccggcgcaccacgtcgagcgtggccgcgaagtcctcttcggtctccccggggaaaccgacgatcagatcggtggtaatcgcggcatgcgggatggccgcccgcacgcgctcgatgatgccgaggtagcgctcggcacgataggaccgccgcatcgcgcgcaggatccggtcggatccggactgtag

SEQ ID NO: 555 - protein, 269 aa, Mycobacterium tuberculosis
TTPTARTPGLRQPKPSRLARFRAQRGVLPPRSQRGGRRDPRRRVRGSSSASSGLGRADRQPDPRHAQADGAPRLPGGVRVAGAGAAVGQDAGVGDEVVRRRFGDLRGDDVAGTHARLAGGEVHQAPVARPPAHARRDGVLAPFPGGHQHLDGLPDQGAVGFQRDLLLQRDQAFIAFLHNGFRQLSVELRGRCPGPLGVLEGKCGREAGPAHHVERGREVLFGLPGETDDQIGGNRGMRDGRPHALDDAEVALGTIGPPHRAQDPVGSGL

SEQ ID NO: 556 - DNA, 357 bp, Mycobacterium tuberculosis
  CDS (1)..(357)
agactggtgtacacggagaccaagctgaactcggcattctccttcggcgggcctaagtgtctagtgaaggtcattcagaaactgtcgggcttgagcatcaaccggttcatcgcgattgacttcgtcggtttcgcgcggatggtcgaggccctcggcggcgtcgaggtatgcagcaccaccccgttgcgggactacgaactgggcacggtgctggagcacgccggacgccaggtcattgacgggccgaccgcgctgaactatgtgcgcgctcgccaggtcaccaccgagagcaatggcgactacgggcgcatcaaacgccagcagttgtttttgtcgtcgctgctgcgttcgatgatc

SEQ ID NO: 557 - protein, 119 aa, Mycobacterium tuberculosis
RLVYTETKLNSAFSFGGPKCLVKVIQKLSGLSINRFIAIDFVGFARMVEALGGVEVCSTTPLRDYELGTVLEHAGRQVIDGPTALNYVRARQVTTESNGDYGRIKRQQLFLSSLLRSMI

SEQ ID NO: 558 - DNA, 356 bp, Mycobacterium tuberculosis
  CDS (1)..(24)
  CDS (28)..(60)
  CDS (67)..(90)
  CDS (94)..(252)
  CDS (256)..(351)
gactggtgtacacggagaccaagctgaactcggcattctccttcggcgggcctaagtgtctagtgaaggtcattcagaaactgtcgggcttgagcatcaaccggttcatcgcgattgacttcgtcggtttcgcgcggatggtcgaggccctcggcggcgtcgaggtatgcagcaccaccccgttgcgggactacgaactgggcacggtgctggagcacgccggacgccaggtcattgacgggccgaccgcgctgaactatgtgcgcgctcgccaggtcaccaccgagagcaatggcgactacgggcgcatcaaacgccagcagttgtttttgtcgtcgctgctgcgttcgatgatc

SEQ ID NO: 559 - protein, 8 aa, Mycobacterium tuberculosis
DWCTRRPS

SEQ ID NO: 560 - protein, 11 aa, Mycobacterium tuberculosis
TRHSPSAGLSV

SEQ ID NO: 561 - protein, 8 aa, Mycobacterium tuberculosis
RSFRNCRA

SEQ ID NO: 562 - protein, 53 aa, Mycobacterium tuberculosis
ASTGSSRLTSSVSRGWSRPSAASRYAAPPRCGTTNWARCWSTPDARSLTGRPR

SEQ ID NO: 563 - protein, 32 aa, Mycobacterium tuberculosis
TMCALARSPPRAMATTGASNASSCFCRRCCVR

SEQ ID NO: 564 - DNA, 355 bp, Mycobacterium tuberculosis
  CDS (1)..(51)
  CDS (55)..(114)
  CDS (118)..(234)
  CDS (238)..(354)
actggtgtacacggagaccaagctgaactcggcattctccttcggcgggcctaagtgtctagtgaaggtcattcagaaactgtcgggcttgagcatcaaccggttcatcgcgattgacttcgtcggtttcgcgcggatggtcgaggccctcggcggcgtcgaggtatgcagcaccaccccgttgcgggactacgaactgggcacggtgctggagcacgccggacgccaggtcattgacgggccgaccgcgctgaactatgtgcgcgctcgccaggtcaccaccgagagcaatggcgactacgggcgcatcaaacgccagcagttgtttttgtcgtcgctgctgcgttcgatgatc

SEQ ID NO: 565 - protein, 17 aa, Mycobacterium tuberculosis
TGVHGDQAELGILLRRA

SEQ ID NO: 566 - protein, 20 aa, Mycobacterium tuberculosis
VSSEGHSETVGLEHQPVHRD

SEQ ID NO: 567 - protein, 39 aa, Mycobacterium tuberculosis
LRRFRADGRGPRRRRGMQHHPVAGLRTGHGAGARRTPGH

SEQ ID NO: 568 - protein, 39 aa, Mycobacterium tuberculosis
RADRAELCARSPGHHREQWRLRAHQTPAVVFVVAAAFDD

SEQ ID NO: 569 - DNA, 2055 bp, Mycobacterium tuberculosis
  CDS (1)..(2052)
atgagtgacggcgagagcgccgcgccgtgggcacggctctccgagtcagcattccccgatggtgttgaccgatggatcacggtaccgcccgccacatgggtggcagcccagggtccgcgggacacccagaatgtcggctgtcatgccaccggcgccgttagtgtggccgatctgatcgccaggctcggccccgcttttcctgacctccccacgcaccgccatgtcgcccccgaacccgagccatccggccgcggcccgaaggtccacgacgacgccgacgaccagcaggacaccgaggctatcgccatcccggcccactcgctcgagttcctctcggagcttcccgacctccgggcagccaactatccgcgcgccgaccacgcccgccgtgaacccgagctacccggcaagcagctaaccggatcggctcgagtgcggccattgcggatccgccgaacgtcgcccgcgcccgccaagccagcgccgaactccggccggcgcccgatggtgctggccgcgcgctcgctggcggctctgtttgccgctctggcgttggcgctgaccggcggggcatggcagtggagcgcgtcgaagaacagccggctgaacatggtaagcgcgctcgacccgcattcgggcgacatcgtcaaccccagcgggcagcatggcgacgagaacttcttgctcgtcggtatggactctcgtgccggggcgaacgccaatatcggcgccggcgacgccgaggacgccggcggcgcacgttcggacaccgtcatgctggtcaacattccggccagccgcgagcgggtcgtcgcggtgtcgttcccccgcgacctggcgatcactccaatccaatgcgaggcgtggaaccccgagaccggtaagtacggacccatctacgacgagaagacgggaacgatgggtcccagactggtgtacacggagaccaagctgaactcggcattctccttcggcgggcctaagtgtctagtgaaggtcattcagaaactgtcgggcttgagcatcaaccggttcatcgcgattgacttcgtcggtttcgcgcggatggtcgaggccctcggcggcgtcgaggtatgcagcaccaccccgttgcgggactacgaactgggcacggtgctggagcacgccggacgccaggtcattgacgggccgaccgcgctgaactatgtgcgcgctcgccaggtcaccaccgagagcaatggcgactacgggcgcatcaaacgccagcagttgtttttgtcgtcgctgctgcgttcgatgatctcgacggacaccttgttcaacctcagcaggctcaacaacgtcgtcaacatgttcatcggtaacagctacgtggacaacgtcaagaccaaagacctggtcgaactcggtcgatcgttgcagcatatggcggccgggcacgtcacgttcgtgaccgttccgaccggtataaccgaccagaacggcgacgagcccccgcgtacctccgacatgaaggcgcttttcaccgccatcatcgacgacgatccgctgcccctggaaaacgatcacaacgcccagcgtctgggcaacacgccgtcgaccccgccgaccaccaccaagaaggcgccgcaggcgggtctgaccaacgagattcagcaccagcaggttacgacgacctcgccaaaagaggtcacagtgcaggtctctaactcgaccggccaggccggtttggccaccaccgccaccgatcagctcaagcggaacggcttcaacgtgatggctccggacgactacccgagttcgctgctggccaccacagtgtttttttcgcccggcaacgaacaggctgccgccaccgtggccgccgtgttcggccagtcaaagatcgagcgggtgaccgggatcggccaactggtccaggtggtgctgggccaagacttcagcgcggtgcgcgctcccctgccgagtggctccaccgtcagcgtgcagataagccgcaactcctccagcccaccgaccaagctgcccgaggacctgacggtcaccaacgccgccgacaccacctgcgagtag

SEQ ID NO: 570 - protein, 684 aa, Mycobacterium tuberculosis
MSDGESAAPWARLSESAFPDGVDRWITVPPATWVAAQGPRDTQNVGCHATGAVSVADLIARLGPAFPDLPTHRHVAPEPEPSGRGPKVHDDADDQQDTEAIAIPAHSLEFLSELPDLRAANYPRADHARREPELPGKQLTGSARVRPLRIRRTSPAPAKPAPNSGRRPMVLAARSLAALFAALALALTGGAWQWSASKNSRLNMVSALDPHSGDIVNPSGQHGDENFLLVGMDSRAGANANIGAGDAEDAGGARSDTVMLVNIPASRERVVAVSFPRDLAITPIQCEAWNPETGKYGPIYDEKTGTMGPRLVYTETKLNSAFSFGGPKCLVKVIQKLSGLSINRFIAIDFVGFARMVEALGGVEVCSTTPLRDYELGTVLEHAGRQVIDGPTALNYVRARQVTTESNGDYGRIKRQQLFLSSLLRSMISTDTLFNLSRLNNVVNMFIGNSYVDNVKTKDLVELGRSLQHMAAGHVTFVTVPTGITDQNGDEPPRTSDMKALFTAIIDDDPLPLENDHNAQRLGNTPSTPPTTTKKAPQAGLTNEIQHQQVTTTSPKEVTVQVSNSTGQAGLATTATDQLKRNGFNVMAPDDYPSSLLATTVFFSPGNEQAAATVAAVFGQSKIERVTGIGQLVQVVLGQDFSAVRAPLPSGSTVSVQISRNSSSPPTKLPEDLTVTNAADTTCE

SEQ ID NO: 571 - DNA, 2061 bp, Mycobacterium tuberculosis
  CDS (4)..(2058)
taggacatgagtgacggcgagagcgccgcgccgtgggcacggctctccgagtcagcattccccgatggtgttgaccgatggatcacggtaccgcccgccacatgggtggcagcccagggtccgcgggacacccagaatgtcggctgtcatgccaccggcgccgttagtgtggccgatctgatcgccaggctcggccccgcttttcctgacctccccacgcaccgccatgtcgcccccgaacccgagccatccggccgcggcccgaaggtccacgacgacgccgacgaccagcaggacaccgaggctatcgccatcccggcccactcgctcgagttcctctcggagcttcccgacctccgggcagccaactatccgcgcgccgaccacgcccgccgtgaacccgagctacccggcaagcagctaaccggatcggctcgagtgcggccattgcggatccgccgaacgtcgcccgcgcccgccaagccagcgccgaactccggccggcgcccgatggtgctggccgcgcgctcgctggcggctctgtttgccgctctggcgttggcgctgaccggcggggcatggcagtggagcgcgtcgaagaacagccggctgaacatggtaagcgcgctcgacccgcattcgggcgacatcgtcaaccccagcgggcagcatggcgacgagaacttcttgctcgtcggtatggactctcgtgccggggcgaacgccaatatcggcgccggcgacgccgaggacgccggcggcgcacgttcggacaccgtcatgctggtcaacattccggccagccgcgagcgggtcgtcgcggtgtcgttcccccgcgacctggcgatcactccaatccaatgcgaggcgtggaaccccgagaccggtaagtacggacccatctacgacgagaagacgggaacgatgggtcccagactggtgtacacggagaccaagctgaactcggcattctccttcggcgggcctaagtgtctagtgaaggtcattcagaaactgtcgggcttgagcatcaaccggttcatcgcgattgacttcgtcggtttcgcgcggatggtcgaggccctcggcggcgtcgaggtatgcagcaccaccccgttgcgggactacgaactgggcacggtgctggagcacgccggacgccaggtcattgacgggccgaccgcgctgaactatgtgcgcgctcgccaggtcaccaccgagagcaatggcgactacgggcgcatcaaacgccagcagttgtttttgtcgtcgctgctgcgttcgatgatctcgacggacaccttgttcaacctcagcaggctcaacaacgtcgtcaacatgttcatcggtaacagctacgtggacaacgtcaagaccaaagacctggtcgaactcggtcgatcgttgcagcatatggcggccgggcacgtcacgttcgtgaccgttccgaccggtataaccgaccagaacggcgacgagcccccgcgtacctccgacatgaaggcgcttttcaccgccatcatcgacgacgatccgctgcccctggaaaacgatcacaacgcccagcgtctgggcaacacgccgtcgaccccgccgaccaccaccaagaaggcgccgcaggcgggtctgaccaacgagattcagcaccagcaggttacgacgacctcgccaaaagaggtcacagtgcaggtctctaactcgaccggccaggccggtttggccaccaccgccaccgatcagctcaagcggaacggcttcaacgtgatggctccggacgactacccgagttcgctgctggccaccacagtgtttttttcgcccggcaacgaacaggctgccgccaccgtggccgccgtgttcggccagtcaaagatcgagcgggtgaccgggatcggccaactggtccaggtggtgctgggccaagacttcagcgcggtgcgcgctcccctgccgagtggctccaccgtcagcgtgcagataagccgcaactcctccagcccaccgaccaagctgcccgaggacctgacggtcaccaacgccgccgacaccacctgcgagtag

SEQ ID NO: 572 - protein, 685 aa, Mycobacterium tuberculosis
DMSDGESAAPWARLSESAFPDGVDRWITVPPATWVAAQGPRDTQNVGCHATGAVSVADLIARLGPAFPDLPTHRHVAPEPEPSGRGPKVHDDADDQQDTEAIAIPAHSLEFLSELPDLRAANYPRADHARREPELPGKQLTGSARVRPLRIRRTSPAPAKPAPNSGRRPMVLAARSLAALFAALALALTGGAWQWSASKNSRLNMVSALDPHSGDIVNPSGQHGDENFLLVGMDSRAGANANIGAGDAEDAGGARSDTVMLVNIPASRERVVAVSFPRDLAITPIQCEAWNPETGKYGPIYDEKTGTMGPRLVYTETKLNSAFSFGGPKCLVKVIQKLSGLSINRFIAIDFVGFARMVEALGGVEVCSTTPLRDYELGTVLEHAGRQVIDGPTALNYVRARQVTTESNGDYGRIKRQQLFLSSLLRSMISTDTLFNLSRLNNVVNMFIGNSYVDNVKTKDLVELGRSLQHMAAGHVTFVTVPTGITDQNGDEPPRTSDMKALFTAIIDDDPLPLENDHNAQRLGNTPSTPPTTTKKAPQAGLTNEIQHQQVTTTSPKEVTVQVSNSTGQAGLATTATDQLKRNGFNVMAPDDYPSSLLATTVFFSPGNEQAAATVAAVFGQSKIERVTGIGQLVQVVLGQDFSAVRAPLPSGSTVSVQISRNSSSPPTKLPEDLTVTNAADTTCE

SEQ ID NO: 573 - DNA, 214 bp, Mycobacterium tuberculosis
  CDS (1)..(156)
  CDS (160)..(213)
cgtcacctctgccatggtccatctacggtatctgcgacaagggcagcgtcgatccctcgacatgcagagtcggtgttcgcttcacgcgaactaggcgcgcctagcctggacgagtccccgggccgacattcgcccgaggccttggcctccatcacctaattgtgtgcaaaaccgtatctaattgatacgattgcgcacatggctatctgggatc

SEQ ID NO: 574 - protein, 52 aa, Mycobacterium tuberculosis
RHLCHGPSTVSATRAASIPRHAESVFASRELGAPSLDESPGRHSPEALASIT

SEQ ID NO: 575 - protein, 18 aa, Mycobacterium tuberculosis
LCAKPYLIDTIAHMAIWD

SEQ ID NO: 576 - DNA, 213 bp, Mycobacterium tuberculosis
  CDS (1)..(77)
  CDS (81)..(213)
gtcacctctgccatggtccatctacggtatctgcgacaagggcagcgtcgatccctcgacatgcagagtcggtgttcgcttcacgcgaactaggcgcgcctagcctggacgagtccccgggccgacattcgcccgaggccttggcctccatcacctaattgtgtgcaaaaccgtatctaattgatacgattgcgcacatggctatctgggatc

SEQ ID NO: 577 - protein, 30 aa, Mycobacterium tuberculosis
VTSAMVHLRYLRQGQRRSLDMQSRCSLHAN

SEQ ID NO: 578 - protein, 28 aa, Mycobacterium tuberculosis
ARLAWTSPRADIRPRPWPPSPNCVQNRI

SEQ ID NO: 579 - protein, 11 aa, Mycobacterium tuberculosis
LIRLRTWLSGI

SEQ ID NO: 580 - DNA, 215 bp, Mycobacterium tuberculosis
  CDS (1)..(102)
  CDS (106)..(183)
  CDS (187)..(213)
ccgtcacctctgccatggtccatctacggtatctgcgacaagggcagcgtcgatccctcgacatgcagagtcggtgttcgcttcacgcgaactaggcgcgcctagcctggacgagtccccgggccgacattcgcccgaggccttggcctccatcacctaattgtgtgcaaaaccgtatctaattgatacgattgcgcacatggctatctgggatc

SEQ ID NO: 581 - protein, 34 aa, Mycobacterium tuberculosis
PSPLPWSIYGICDKGSVDPSTCRVGVRFTRTRRA

SEQ ID NO: 582 - protein, 26 aa, Mycobacterium tuberculosis
PGRVPGPTFARGLGLHHLIVCKTVSN

SEQ ID NO: 583 - protein, 9 aa, Mycobacterium tuberculosis
YDCAHGYLG

SEQ ID NO: 584 - DNA, 624 bp, Mycobacterium tuberculosis
  CDS (1)..(621)
ttgtgtgcaaaaccgtatctaattgatacgattgcgcacatggctatctgggatcgcctcgtcgaggttgccgccgagcaacatggctacgtcacgactcgcgatgcgcgagacatcggcgtcgaccctgtgcagctccgcctcctagcggggcgcggacgtcttgagcgtgtcggccgaggtgtgtaccgggtgcccgtgctgccgcgtggtgagcacgacgatctcgcagccgcagtgtcgtggactttggggcgtggcgttatctcgcatgagtcggccttggcgcttcatgccctcgctgacgtgaacccgtcgcgcatccatctcaccgtcccgcgcaacaaccatccgcgtgcggccgggggcgagctgtaccgagttcaccgccgcgacctccaggcagcccacgtcacttcggtcgacggaatacccgtcacgacggttgcgcgcaccatcaaagactgcgtgaagacgggcacggatccttatcagcttcgggccgcgatcgagcgagccgaagccgagggcacgcttcgtcgtgggtcagcagctgagctacgcgctgcgctcgatgagaccactgccggattacgcgctcggccgaagcgagcatcggcgtga

SEQ ID NO: 585 - protein, 207 aa, Mycobacterium tuberculosis
LCAKPYLIDTIAHMAIWDRLVEVAAEQHGYVTTRDARDIGVDPVQLRLLAGRGRLERVGRGVYRVPVLPRGEHDDLAAAVSWTLGRGVISHESALALHALADVNPSRIHLTVPRNNHPRAAGGELYRVHRRDLQAAHVTSVDGIPVTTVARTIKDCVKTGTDPYQLRAAIERAEAEGTLRRGSAAELRAALDETTAGLRARPKRASA

SEQ ID NO: 586 - DNA, 627 bp, Mycobacterium tuberculosis
  CDS (4)..(624)
taattgtgtgcaaaaccgtatctaattgatacgattgcgcacatggctatctgggatcgcctcgtcgaggttgccgccgagcaacatggctacgtcacgactcgcgatgcgcgagacatcggcgtcgaccctgtgcagctccgcctcctagcggggcgcggacgtcttgagcgtgtcggccgaggtgtgtaccgggtgcccgtgctgccgcgtggtgagcacgacgatctcgcagccgcagtgtcgtggactttggggcgtggcgttatctcgcatgagtcggccttggcgcttcatgccctcgctgacgtgaacccgtcgcgcatccatctcaccgtcccgcgcaacaaccatccgcgtgcggccgggggcgagctgtaccgagttcaccgccgcgacctccaggcagcccacgtcacttcggtcgacggaatacccgtcacgacggttgcgcgcaccatcaaagactgcgtgaagacgggcacggatccttatcagcttcgggccgcgatcgagcgagccgaagccgagggcacgcttcgtcgtgggtcagcagctgagctacgcgctgcgctcgatgagaccactgccggattacgcgctcggccgaagcgagcatcggcgtga

SEQ ID NO: 587 - protein, 207 aa, Mycobacterium tuberculosis; identical to SEQ ID NO: 585

SEQ ID NO: 588 - DNA, 215 bp, Mycobacterium tuberculosis
  CDS (1)..(213)
atccaacctgctgggcctgcgccttcgaatcgacggccaggccaccgctcgctgccggcaacaacacctggaatggggaccttttcggtgttgctggtaaccgggacaaccggcaccacgcctcggtcgagacgtatcgcggcagcgttggccctgtcgttgctgacaattaccgctggccgccgcatatttgccgcgctgccgcgggccggatc

SEQ ID NO: 589 - protein, 71 aa, Mycobacterium tuberculosis
IQPAGPAPSNRRPGHRSLPATTPGMGTFSVLLVTGTTGTTPRSRRIAAALALSLLTITAGRRIFAALPRAG

SEQ ID NO: 590 - DNA, 214 bp, Mycobacterium tuberculosis
  CDS (1)..(96)
  CDS (100)..(162)
  CDS (166)..(213)
tccaacctgctgggcctgcgccttcgaatcgacggccaggccaccgctcgctgccggcaacaacacctggaatggggaccttttcggtgttgctggtaaccgggacaaccggcaccacgcctcggtcgagacgtatcgcggcagcgttggccctgtcgttgctgacaattaccgctggccgccgcatatttgccgcgctgccgcgggccggatc

SEQ ID NO: 591 - protein, 32 aa, Mycobacterium tuberculosis
SNLLGLRLRIDGQATARCRQQHLEWGPFRCCW

SEQ ID NO: 592 - protein, 21 aa, Mycobacterium tuberculosis
PGQPAPRLGRDVSRQRWPCRC

SEQ ID NO: 593 - protein, 16 aa, Mycobacterium tuberculosis
QLPLAAAYLPRCRGPD

SEQ ID NO: 594 - DNA, 216 bp, Mycobacterium tuberculosis
  CDS (1)..(216)
gatccaacctgctgggcctgcgccttcgaatcgacggccaggccaccgctcgctgccggcaacaacacctggaatggggaccttttcggtgttgctggtaaccgggacaaccggcaccacgcctcggtcgagacgtatcgcggcagcgttggccctgtcgttgctgacaattaccgctggccgccgcatatttgccgcgctgccgcgggccggatc

SEQ ID NO: 595 - protein, 72 aa, Mycobacterium tuberculosis
DPTCWACAFESTARPPLAAGNNTWNGDLFGVAGNRDNRHHASVETYRGSVGPVVADNYRWPPHICRAAAGRI

SEQ ID NO: 596 - DNA, 528 bp, Mycobacterium tuberculosis
  CDS (4)..(525)
tagccgcagggccctgcggctaggcgcggccggtgccgttggccgcggcggcaatcgatgttgcagcagttacaacgccaaatggagtctgagcgcatcgtcgagttcgatcagctcggcaggggagacgttgcgcagcgacggatccaacctgctgggcctgcgccttcgaatcgacggccaggccaccgctcgctgccggcaacaacacctggaatggggaccttttcggtgttgctggtaaccgggacaaccggcaccacgcctcggtcgagacgtatcgcggcagcgttggccctgtcgttgctgacaattaccgctggccgccgcatatttgccgcgctgccgcgggccggatccaggtcgacctgccagatctcaccgcgcagcatctacgccgttcgctgcaaaccgccgactgcgacggcaggcccactctcttggcatgcgtccaatgctgcgacgtcctcggtagacaagctcacgcttggcttcatgccgcagtcctacccatgtagtaacagatag

SEQ ID NO: 597 - protein, 174 aa, Mycobacterium tuberculosis
PQGPAARRGRCRWPRRQSMLQQLQRQMESERIVEFDQLGRGDVAQRRIQPAGPAPSNRRPGHRSLPATTPGMGTFSVLLVTGTTGTTPRSRRIAAALALSLLTITAGRRIFAALPRAGSRSTCQISPRSIYAVRCKPPTATAGPLSWHASNAATSSVDKLTLGFMPQSYPCSNR

SEQ ID NO: 598 - DNA, 403 bp, Mycobacterium tuberculosis
  CDS (1)..(402)
cagtctgtcggcaaggagggacgcatgccactctccgatcatgagcagcggatgcttgaccagatcgagagcgctctctacgccgaagatcccaagttcgcatcgagtgtccgtggcgggggcttccgcgcaccgaccgcgcggcggcgcctgcagggcgcggcgttgttcatcatcggtctggggatgttggtttccggcgtggcgttcaaagagaccatgatcggaagtttcccgatactcagcgttttcggttttgtcgtgatgttcggtggtgtggtgtatgccatcaccggtcctcggttgtccggcaggatggatcgtggcggatcggctgctggggcttcgcgccagcgtcgtaccaagggggccgggggctcattcaccagccgtatggaagatc

SEQ ID NO: 599 - protein, 134 aa, Mycobacterium tuberculosis
QSVGKEGRMPLSDHEQRMLDQIESALYAEDPKFASSVRGGGFRAPTARRRLQGAALFIIGLGMLVSGVAFKETMIGSFPILSVFGFVVMFGGVVYAITGPRLSGRMDRGGSAAGASRQRRTKGAGGSFTSRMED

SEQ ID NO: 600 - DNA, 405 bp, Mycobacterium tuberculosis
  CDS (1)..(222)
  CDS (226)..(264)
  CDS (268)..(405)
gacagtctgtcggcaaggagggacgcatgccactctccgatcatgagcagcggatgcttgaccagatcgagagcgctctctacgccgaagatcccaagttcgcatcgagtgtccgtggcgggggcttccgcgcaccgaccgcgcggcggcgcctgcagggcgcggcgttgttcatcatcggtctggggatgttggtttccggcgtggcgttcaaagagaccatgatcggaagtttcccgatactcagcgttttcggttttgtcgtgatgttcggtggtgtggtgtatgccatcaccggtcctcggttgtccggcaggatggatcgtggcggatcggctgctggggcttcgcgccagcgtcgtaccaagggggccgggggctcattcaccagccgtatggaagatc

SEQ ID NO: 601 - protein, 74 aa, Mycobacterium tuberculosis
DSLSARRDACHSPIMSSGCLTRSRALSTPKIPSSHRVSVAGASAHRPRGGACRARRCSSSVWGCWFPAWRSKRP

SEQ ID NO: 602 - protein, 13 aa, Mycobacterium tuberculosis
SEVSRYSAFSVLS

SEQ ID NO: 603 - protein, 46 aa, Mycobacterium tuberculosis
CSVVWCMPSPVLGCPAGWIVADRLLGLRASVVPRGPGAHSPAVWKI

SEQ ID NO: 604 - DNA, 404 bp, Mycobacterium tuberculosis
  CDS (1)..(42)
  CDS (46)..(57)
  CDS (61)..(402)
acagtctgtcggcaaggagggacgcatgccactctccgatcatgagcagcggatgcttgaccagatcgagagcgctctctacgccgaagatcccaagttcgcatcgagtgtccgtggcgggggcttccgcgcaccgaccgcgcggcggcgcctgcagggcgcggcgttgttcatcatcggtctggggatgttggtttccggcgtggcgttcaaagagaccatgatcggaagtttcccgatactcagcgttttcggttttgtcgtgatgttcggtggtgtggtgtatgccatcaccggtcctcggttgtccggcaggatggatcgtggcggatcggctgctggggcttcgcgccagcgtcgtaccaagggggccgggggctcattcaccagccgtatggaagatc

SEQ ID NO: 605 - protein, 14 aa, Mycobacterium tuberculosis
TVCRQGGTHATLRS

SEQ ID NO: 606 - protein, 4 aa, Mycobacterium tuberculosis
AADA

SEQ ID NO: 607 - protein, 114 aa, Mycobacterium tuberculosis
PDRERSLRRRSQVRIECPWRGLPRTDRAAAPAGRGVVHHRSGDVGFRRGVQRDHDRKFPDTQRFRFCRDVRWCGVCHHRSSVVRQDGSWRIGCWGFAPASYQGGRGLIHQPYGR

SEQ ID NO: 608 - DNA, 405 bp, Mycobacterium tuberculosis
  CDS (1)..(402)
atgccactctccgatcatgagcagcggatgcttgaccagatcgagagcgctctctacgccgaagatcccaagttcgcatcgagtgtccgtggcgggggcttccgcgcaccgaccgcgcggcggcgcctgcagggcgcggcgttgttcatcatcggtctggggatgttggtttccggcgtggcgttcaaagagaccatgatcggaagtttcccgatactcagcgttttcggttttgtcgtgatgttcggtggtgtggtgtatgccatcaccggtcctcggttgtccggcaggatggatcgtggcggatcggctgctggggcttcgcgccagcgtcgtaccaagggggccgggggctcattcaccagccgtatggaagatcggttccggcgccgcttcgacgagtaa

SEQ ID NO: 609 - protein, 134 aa, Mycobacterium tuberculosis
MPLSDHEQRMLDQIESALYAEDPKFASSVRGGGFRAPTARRRLQGAALFIIGLGMLVSGVAFKETMIGSFPILSVFGFVVMFGGVVYAITGPRLSGRMDRGGSAAGASRQRRTKGAGGSFTSRMEDRFRRRFDE

SEQ ID NO: 610 - DNA, 432 bp, Mycobacterium tuberculosis
  CDS (4)..(429)
tgacagtctgtcggcaaggagggacgcatgccactctccgatcatgagcagcggatgcttgaccagatcgagagcgctctctacgccgaagatcccaagttcgcatcgagtgtccgtggcgggggcttccgcgcaccgaccgcgcggcggcgcctgcagggcgcggcgttgttcatcatcggtctggggatgttggtttccggcgtggcgttcaaagagaccatgatcggaagtttcccgatactcagcgttttcggttttgtcgtgatgttcggtggtgtggtgtatgccatcaccggtcctcggttgtccggcaggatggatcgtggcggatcggctgctggggcttcgcgccagcgtcgtaccaagggggccgggggctcattcaccagccgtatggaagatcggttccggcgccgcttcgacgagtaa

SEQ ID NO: 611 - protein, 142 aa, Mycobacterium tuberculosis
QSVGKEGRMPLSDHEQRMLDQIESALYAEDPKFASSVRGGGFRAPTARRRLQGAALFIIGLGMLVSGVAFKETMIGSFPILSVFGFVVMFGGVVYAITGPRLSGRMDRGGSAAGASRQRRTKGAGGSFTSRMEDRFRRRFDE

SEQ ID NO: 612 - DNA, 415 bp, Mycobacterium tuberculosis
  CDS (1)..(414)
gacctgggacgaagacgacggcagcagccgcaatcagatctacccggtcctggtcaacgtcaatggacacccgactacggtgcgcctgcgcggctcgacaatgcgcggttcctgttgcccgtggtcggagtgccacccgaccaggccaccgacttcggctccgctgttgcaccagaaacgacggcgccggtctggatcaccatgctgtggccgctggccgaccggccccggttggcccccggggcacccggtggcaccgttcccgtccggctggtcgacgacgacctggcaaactcgctggccaacggcggccggctggacatcctcctgtcggcggccgagttcgccaccaaccgggaagtcgaccccgacggcgccgtcggccgagcgctgtgcctggccatcgacccagatc

SEQ ID NO: 613 - protein, 138 aa, Mycobacterium tuberculosis
DLGRRRRQQPQSDLPGPGQRQWTPDYGAPARLDNARFLLPVVGVPPDQATDFGSAVAPETTAPVWITMLWPLADRPRLAPGAPGGTVPVRLVDDDLANSLANGGRLDILLSAAEFATNREVDPDGAVGRALCLAIDPD

SEQ ID NO: 614 - DNA, 414 bp, Mycobacterium tuberculosis
  CDS (1)..(414)
acctgggacgaagacgacggcagcagccgcaatcagatctacccggtcctggtcaacgtcaatggacacccgactacggtgcgcctgcgcggctcgacaatgcgcggttcctgttgcccgtggtcggagtgccacccgaccaggccaccgacttcggctccgctgttgcaccagaaacgacggcgccggtctggatcaccatgctgtggccgctggccgaccggccccggttggcccccggggcacccggtggcaccgttcccgtccggctggtcgacgacgacctggcaaactcgctggccaacggcggccggctggacatcctcctgtcggcggccgagttcgccaccaaccgggaagtcgaccccgacggcgccgtcggccgagcgctgtgcctggccatcgacccagatc

SEQ ID NO: 615 - protein, 138 aa, Mycobacterium tuberculosis
TWDEDDGSSRNQIYPVLVNVNGHPTTVRLRGSTMRGSCCPWSECHPTRPPTSAPLLHQKRRRRSGSPCCGRWPTGPGWPPGHPVAPFPSGWSTTTWQTRWPTAAGWTSSCRRPSSPPTGKSTPTAPSAERCAWPSTQI

SEQ ID NO: 616 - DNA, 413 bp, Mycobacterium tuberculosis
  CDS (1)..(411)
cctgggacgaagacgacggcagcagccgcaatcagatctacccggtcctggtcaacgtcaatggacacccgactacggtgcgcctgcgcggctcgacaatgcgcggttcctgttgcccgtggtcggagtgccacccgaccaggccaccgacttcggctccgctgttgcaccagaaacgacggcgccggtctggatcaccatgctgtggccgctggccgaccggccccggttggcccccggggcacccggtggcaccgttcccgtccggctggtcgacgacgacctggcaaactcgctggccaacggcggccggctggacatcctcctgtcggcggccgagttcgccaccaaccgggaagtcgaccccgacggcgccgtcggccgagcgctgtgcctggccatcgacccagatc

SEQ ID NO: 617 - protein, 137 aa, Mycobacterium tuberculosis
PGTKTTAAAAIRSTRSWSTSMDTRLRCACAARQCAVPVARGRSATRPGHRLRLRCCTRNDGAGLDHHAVAAGRPAPVGPRGTRWHRSRPAGRRRPGKLAGQRRPAGHPPVGGRVRHQPGSRPRRRRRPSAVPGHRPR

SEQ ID NO: 618 - DNA, 2409 bp, Mycobacterium tuberculosis
  CDS (1)..(2406)
gtgaccgcactgcaactcggctgggccgctttggcgcgcgtcacctcagcgatcggcgtcgtggccggcctcgggatggcgctcacggtaccgtcggcggcaccgcacgcgctcgcaggcgagcccagcccgacgccttttgtccaggtccgcatcgatcaggtgaccccggacgtggtgaccacttccagcgaaccccatgtcaccgtcagcggaacggtgaccaataccggtgaccgcccagtccgcgatgtgatggtccggcttgagcacgccgccgcggtcacgtcgtcaacggcgttacgcacctcgctcgacggcggcaccgaccagtaccagccggccgcggacttcctcacggtcgcccccgaactagaccgcgggcaagaggccggctttaccctctcggccccgctgcgctcgctgaccaggccgtcgttggccgtcaaccagcccgggatctacccggtcctggtcaacgtcaatgggacacccgactacggtgcgcctgcgcggctcgacaatgcgcggttcctgttgcccgtggtcggagtgccacccgaccaggccaccgacttcggctccgctgttgcaccagaaacgacggcgccggtctggatcaccatgctgtggccgctggccgaccggccccggttggcccccggggcacccggtggcaccgttcccgtccggctggtcgacgacgacctggcaaactcgctggccaacggcggccggctggacatcctcctgtcggcggccgagttcgccaccaaccgggaagtcgaccccgacggcgccgtcggccgagcgctgtgcctggccatcgacccagatctactcatcaccgtcaatgcgatgaccggcggctacgtcgtgtccgactcgcccgacggggccgctcaactaccgggcaccccgacccacccgggcaccggccaggccgccgcatccagctggctggatcgattgcggacgctagtccaccggacatgcgtgacgccgctgccttttgcccaagccgacctggatgctttgcagcgggttaatgatccgaggctgagcgcgatcgcaaccatcagccccgccgacatcgtcgaccgcatcctggatgtcagctccacccgcggcgcaaccgtgctgcccgacggcccgttgaccggccgggcgatcaacttgctcagcacccacggcaacacggttgccgtcgcggccgccgattttagccccgaggaacagcagggttcgtcccagatcggctccgcgctcttacccgctaccgcgccccggcggttgtccccgcgggtggtagcggcgccgtttgatcccgcggtcggggccgcgctggccgccgcgggaacaaacccgaccgttcctacctatctagatccctcgttgttcgttcggatcgcgcatgaatcgatcaccgcgcgccgccaggacgccttgggcgcaatgctgtggcgcagcttggagccgaatgccgcgccccgtacccaaatcctggtgccgccggcgtcgtggagcctggccagcgacgacgcgcaggtcatcctgaccgcgctggccaccgccatccggtctggcctggccgtgccgcgaccactaccggcggtgatcgctgacgccgcggcccgcaccgagccaccggaacccccgggcgcttacagcgccgctcgcggccggttcaatgacgacatcaccacgcagatcggcgggcaggttgcccggctatggaagctgacctcggcgttgaccatcgatgaccgcaccgggctgaccggcgtgcagtacaccgcaccactacgcgaggacatgttgcgcgcgctgagccaatcgctaccacccgatacccgcaacgggctggcccagcagcggctggccgtcgttggaaagacgatcgacgatcttttcggcgcggtgaccatcgtcaacccgggcggctcctacactctggccaccgagcacagtccgctgccgttggcgctgcataatggcctcgccgtgccaatccgggtccggctacaggtcgatgctccgcccgggatgacggtggccgatgtcggtcagatcgagctaccgcccgggtacctgccgctacgagtaccaatcgaggtgaacttcacacagcgggttgccgtcgacgtgtcgctgcggacccccgacggcgtcgcgctgggtgaaccggtgcggttgtcggtgcactccaacgcctacggcaaggtgttgttcgcgatcacgctatccgctgcggccgtgctggtaacgctggcgggccggcgcctttggcaccggttccgtggccagcctgatcgcgccgacctggatcgccccgacctgcctaccggcaaacacgccccgcagcgccgtgccgtagccagtcgggatgacgaaaagcaccgggtatga

SEQ ID NO: 619 - protein, 802 aa, Mycobacterium tuberculosis
MTALQLGWAALARVTSAIGVVAGLGMALTVPSAAPHALAGEPSPTPFVQVRIDQVTPDVVTTSSEPHVTVSGTVTNTGDRPVRDVMVRLEHAAAVTSSTALRTSLDGGTDQYQPAADFLTVAPELDRGQEAGFTLSAPLRSLTRPSLAVNQPGIYPVLVNVNGTPDYGAPARLDNARFLLPVVGVPPDQATDFGSAVAPETTAPVWITMLWPLADRPRLAPGAPGGTVPVRLVDDDLANSLANGGRLDILLSAAEFATNREVDPDGAVGRALCLAIDPDLLITVNAMTGGYVVSDSPDGAAQLPGTPTHPGTGQAAASSWLDRLRTLVHRTCVTPLPFAQADLDALQRVNDPRLSAIATISPADIVDRILDVSSTRGATVLPDGPLTGRAINLLSTHGNTVAVAAADFSPEEQQGSSQIGSALLPATAPRRLSPRVVAAPFDPAVGAALAAAGTNPTVPTYLDPSLFVRIAHESITARRQDALGAMLWRSLEPNAAPRTQILVPPASWSLASDDAQVILTALATAIRSGLAVPRPLPAVIADAAARTEPPEPPGAYSAARGRFNDDITTQIGGQVARLWKLTSALTIDDRTGLTGVQYTAPLREDMLRALSQSLPPDTRNGLAQQRLAVVGKTIDDLFGAVTIVNPGGSYTLATEHSPLPLALHNGLAVPIRVRLQVDAPPGMTVADVGQIELPPGYLPLRVPIEVNFTQRVAVDVSLRTPDGVALGEPVRLSVHSNAYGKVLFAITLSAAAVLVTLAGRRLWHRFRGQPDRADLDRPDLPTGKHAPQRRAVASRDDEKHRV

SEQ ID NO: 620 - DNA, 2451 bp, Mycobacterium tuberculosis
  CDS (4)..(2448)
tgactcagcaccgggtcagcacaacggtcccgggccggggccgtgaccgcactgcaactcggctgggccgctttggcgcgcgtcacctcagcgatcggcgtcgtggccggcctcgggatggcgctcacggtaccgtcggcggcaccgcacgcgctcgcaggcgagcccagcccgacgccttttgtccaggtccgcatcgatcaggtgaccccggacgtggtgaccacttccagcgaaccccatgtcaccgtcagcggaacggtgaccaataccggtgaccgcccagtccgcgatgtgatggtccggcttgagcacgccgccgcggtcacgtcgtcaacggcgttacgcacctcgctcgacggcggcaccgaccagtaccagccggccgcggacttcctcacggtcgcccccgaactagaccgcgggcaagaggccggctttaccctctcggccccgctgcgctcgctgaccaggccgtcgttggccgtcaaccagcccgggatctacccggtcctggtcaacgtcaatgggacacccgactacggtgcgcctgcgcggctcgacaatgcgcggttcctgttgcccgtggtcggagtgccacccgaccaggccaccgacttcggctccgctgttgcaccagaaacgacggcgccggtctggatcaccatgctgtggccgctggccgaccggccccggttggcccccggggcacccggtggcaccgttcccgtccggctggtcgacgacgacctggcaaactcgctggccaacggcggccggctggacatcctcctgtcggcggccgagttcgccaccaaccgggaagtcgaccccgacggcgccgtcggccgagcgctgtgcctggccatcgacccagatctactcatcaccgtcaatgcgatgaccggcggctacgtcgtgtccgactcgcccgacggggccgctcaactaccgggcaccccgacccacccgggcaccggccaggccgccgcatccagctggctggatcgattgcggacgctagtccaccggacatgcgtgacgccgctgccttttgcccaagccgacctggatgctttgcagcgggttaatgatccgaggctgagcgcgatcgcaaccatcagccccgccgacatcgtcgaccgcatcctggatgtcagctccacccgcggcgcaaccgtgctgcccgacggcccgttgaccggccgggcgatcaacttgctcagcacccacggcaacacggttgccgtcgcggccgccgattttagccccgaggaacagcagggttcgtcccagatcggctccgcgctcttacccgctaccgcgccccggcggttgtccccgcgggtggtagcggcgccgtttgatcccgcggtcggggccgcgctggccgccgcgggaacaaacccgaccgttcctacctatctagatccctcgttgttcgttcggatcgcgcatgaatcgatcaccgcgcgccgccaggacgccttgggcgcaatgctgtggcgcagcttggagccgaatgccgcgccccgtacccaaatcctggtgccgccggcgtcgtggagcctggccagcgacgacgcgcaggtcatcctgaccgcgctggccaccgccatccggtctggcctggccgtgccgcgaccactaccggcggtgatcgctgacgccgcggcccgcaccgagccaccggaacccccgggcgcttacagcgccgctcgcggccggttcaatgacgacatcaccacgcagatcggcgggcaggttgcccggctatggaagctgacctcggcgttgaccatcgatgaccgcaccgggctgaccggcgtgcagtacaccgcaccactacgcgaggacatgttgcgcgcgctgagccaatcgctaccacccgatacccgcaacgggctggcccagcagcggctggccgtcgttggaaagacgatcgacgatcttttcggcgcggtgaccatcgtcaacccgggcggctcctacactctggccaccgagcacagtccgctgccgttggcgctgcataatggcctcgccgtgccaatccgggtccggctacaggtcgatgctccgcccgggatgacggtggccgatgtcggtcagatcgagctaccgcccgggtacctgccgctacgagtaccaatcgaggtgaacttcacacagcgggttgccgtcgacgtgtcgctgcggacccccgacggcgtcgcgctgggtgaaccggtgcggttgtcggtgcactccaacgcctacggcaaggtgttgttcgcgatcacgctatccgctgcggccgtgctggtaacgctggcgggccggcgcctttggcaccggttccgtggccagcctgatcgcgccgacctggatcgccccgacctgcctaccggcaaacacgccccgcagcgccgtgccgtagccagtcgggatgacgaaaagcaccgggtatga

SEQ ID NO: 621 - protein, 815 aa, Mycobacterium tuberculosis
LSTGSAQRSRAGAVTALQLGWAALARVTSAIGVVAGLGMALTVPSAAPHALAGEPSPTPFVQVRIDQVTPDVVTTSSEPHVTVSGTVTNTGDRPVRDVMVRLEHAAAVTSSTALRTSLDGGTDQYQPAADFLTVAPELDRGQEAGFTLSAPLRSLTRPSLAVNQPGIYPVLVNVNGTPDYGAPARLDNARFLLPVVGVPPDQATDFGSAVAPETTAPVWITMLWPLADRPRLAPGAPGGTVPVRLVDDDLANSLANGGRLDILLSAAEFATNREVDPDGAVGRALCLAIDPDLLITVNAMTGGYVVSDSPDGAAQLPGTPTHPGTGQAAASSWLDRLRTLVHRTCVTPLPFAQADLDALQRVNDPRLSAIATISPADIVDRILDVSSTRGATVLPDGPLTGRAINLLSTHGNTVAVAAADFSPEEQQGSSQIGSALLPATAPRRLSPRVVAAPFDPAVGAALAAAGTNPTVPTYLDPSLFVRIAHESITARRQDALGAMLWRSLEPNAAPRTQILVPPASWSLASDDAQVILTALATAIRSGLAVPRPLPAVIADAAARTEPPEPPGAYSAARGRFNDDITTQIGGQVARLWKLTSALTIDDRTGLTGVQYTAPLREDMLRALSQSLPPDTRNGLAQQRLAVVGKTIDDLFGAVTIVNPGGSYTLATEHSPLPLALHNGLAVPIRVRLQVDAPPGMTVADVGQIELPPGYLPLRVPIEVNFTQRVAVDVSLRTPDGVALGEPVRLSVHSNAYGKVLFAITLSAAAVLVTLAGRRLWHRFRGQPDRADLDRPDLPTGKHAPQRRAVASRDDEKHRV

SEQ ID NO: 622 - DNA, 249 bp, Mycobacterium tuberculosis
  CDS (1)..(249)
atccgcgcgttggcgtcgcatccgaacatcgtcggagtcaaggacgccaaagccgacctgcacagcggcgcccaaatcatggccgacaccggactggcctactattccggcgacgacgcgctcaacctgccctggctggccatgggcgccacgggcttcatcagcgtgattgcccacctggcagccgggcagcttcgagagttgttgtccgccttcggttctggggatatcgccaccgcccgcaagatc

SEQ ID NO: 623 - protein, 83 aa, Mycobacterium tuberculosis
IRALASHPNIVGVKDAKADLHSGAQIMADTGLAYYSGDDALNLPWLAMGATGFISVIAHLAAGQLRELLSAFGSGDIATARKI

SEQ ID NO: 624 - DNA, 250 bp, Mycobacterium tuberculosis
  CDS (1)..(249)
gatccgcgcgttggcgtcgcatccgaacatcgtcggagtcaaggacgccaaagccgacctgcacagcggcgcccaaatcatggccgacaccggactggcctactattccggcgacgacgcgctcaacctgccctggctggccatgggcgccacgggcttcatcagcgtgattgcccacctggcagccgggcagcttcgagagttgttgtccgccttcggttctggggatatcgccaccgcccgcaagatc

SEQ ID NO: 625 - protein, 83 aa, Mycobacterium tuberculosis
DPRVGVASEHRRSQGRQSRPAQRRPNHGRHRTGLLFRRRRAQPALAGHGRHGLHQRDCPPGSRAASRVVVRLRFWGYRHRPQD

SEQ ID NO: 626 - DNA, 248 bp, Mycobacterium tuberculosis
  CDS (1)..(165)
  CDS (169)..(246)
tccgcgcgttggcgtcgcatccgaacatcgtcggagtcaaggacgccaaagccgacctgcacagcggcgcccaaatcatggccgacaccggactggcctactattccggcgacgacgcgctcaacctgccctggctggccatgggcgccacgggcttcatcagcgtgattgcccacctggcagccgggcagcttcgagagttgttgtccgccttcggttctggggatatcgccaccgcccgcaagatc

SEQ ID NO: 627 - protein, 55 aa, Mycobacterium tuberculosis
SARWRRIRTSSESRTPKPTCTAAPKSWPTPDWPTIPATTRSTCPGWPWAPRASSA

SEQ ID NO: 628 - protein, 26 aa, Mycobacterium tuberculosis
LPTWQPGSFESCCPPSVLGISPPPAR

SEQ ID NO: 629 - DNA, 903 bp, Mycobacterium tuberculosis
  CDS (1)..(900)
gtgaccaccgtcggattcgacgtcgcagcgcgcctaggaaccctgctgaccgcgatggtgacaccgtttagcggcgatggctccctggacaccgccaccgcggcgcggctggccaaccacctggtcgatcaggggtgcgacggtctggtggtctcgggcaccaccggcgagtcgccgaccaccaccgacggggagaaaatcgagctgctgcgggccgtcttggaagcggtgggggaccgggcccgtgttatcgccggtgccggcacctatgacaccgcgcacagcatccggctggccaaggcttgtgcggccgagggtgcgcacgggctgctggtggtcacgccctactattccaagccgccgcagcgggggctgcaagcccatttcaccgccgtcgccgacgcgaccgagctgccgatgctgctctatgacatcccggggcggtcggcggtgccgatcgagcccgacacgatccgcgcgttggcgtcgcatccgaacatcgtcggagtcaaggacgccaaagccgacctgcacagcggcgcccaaatcatggccgacaccggactggcctactattccggcgacgacgcgctcaacctgccctggctggccatgggcgccacgggcttcatcagcgtgattgcccacctggcagccgggcagcttcgagagttgttgtccgccttcggttctggggatatcgccaccgcccgcaagatcaacattgcggtcgccccgctgtgcaacgcgatgagccgcctgggtggggtgacgttgtccaaggcgggcttgcggctgcagggcatcgacgtcggtgatccccggctgccccaggtggccgcgacaccggagcagatcgacgcgttggccgccgacatgcgcgcggcctcggtgcttcggtga

SEQ ID NO: 630 - protein, 300 aa, Mycobacterium tuberculosis
VTTVGFDVAARLGTLLTAMVTPFSGDGSLDTATAARLANHLVDQGCDGLVVSGTTGESPTTTDGEKIELLRAVLEAVGDRARVIAGAGTYDTAHSIRLAKACAAEGAHGLLVVTPYYSKPPQRGLQAHFTAVADATELPMLLYDIPGRSAVPIEPDTIRALASHPNIVGVKDAKADLHSGAQIMADTGLAYYSGDDALNLPWLAMGATGFISVIAHLAAGQLRELLSAFGSGDIATARKINIAVAPLCNAMSRLGGVTLSKAGLRLQGIDVGDPRLPQVAATPEQIDALAADMRAASVLR

SEQ ID NO: 631 - DNA, 1737 bp, Mycobacterium tuberculosis
  CDS (4)..(1734)
taaggtgagcgccgtggccgagaccgcgccgctgcgcgtgcaactgatcgccaagaccgacttcttggccccacccgacgtgccctggaccaccgacgccgacggcggacccgcgctggtcgagttcgccggccgggcctgctatcagagctggtccaagcccaatcccaagaccgccaccaacgccggctacctccggcacatcatcgacgtcggacatttctcggtgctagagcatgccagcgtgtcgttctacatcaccgggatctcgcgatcgtgcacccacgagctgatccgccaccggcatttctcctactcgcagctctcccagcgctacgtacccgagaaggactcgcgggtcgtcgtgccgcccggcatggaggacgacgccgacctgcgccacatcctgaccgaggccgccgacgccgcccgcgccacctacagcgagctgctggccaagctggaagccaagttcgccgaccaacccaacgcgatcctgcgccgcaagcaggcccgccaagccgcccgcgcggtgctgcccaacgccaccgaaacccgcatcgtggtgaccggcaactaccgggcctggcggcacttcatcgcaatgcgggccagcgagcacgccgacgtggaaatccggcgactggccatcgaatgcctgcgccagctcgccgccgtggcccccgcggtgttcgccgacttcgaggtgaccaccctggccgacggcaccgaggtggcgaccagcccgttggcgaccgaagcctgaggcggcgtgtcgctggacaaacacgcgcgctcgcggccgggataaagcgccaggtaaccttgggagccgtgaccaccgtcggattcgacgtcgcagcgcgcctaggaaccctgctgaccgcgatggtgacaccgtttagcggcgatggctccctggacaccgccaccgcggcgcggctggccaaccacctggtcgatcaggggtgcgacggtctggtggtctcgggcaccaccggcgagtcgccgaccaccaccgacggggagaaaatcgagctgctgcgggccgtcttggaagcggtgggggaccgggcccgtgttatcgccggtgccggcacctatgacaccgcgcacagcatccggctggccaaggcttgtgcggccgagggtgcgcacgggctgctggtggtcacgccctactattccaagccgccgcagcgggggctgcaagcccatttcaccgccgtcgccgacgcgaccgagctgccgatgctgctctatgacatcccggggcggtcggcggtgccgatcgagcccgacacgatccgcgcgttggcgtcgcatccgaacatcgtcggagtcaaggacgccaaagccgacctgcacagcggcgcccaaatcatggccgacaccggactggcctactattccggcgacgacgcgctcaacctgccctggctggccatgggcgccacgggcttcatcagcgtgattgcccacctggcagccgggcagcttcgagagttgttgtccgccttcggttctggggatatcgccaccgcccgcaagatcaacattgcggtcgccccgctgtgcaacgcgatgagccgcctgggtggggtgacgttgtccaaggcgggcttgcggctgcagggcatcgacgtcggtgatccccggctgccccaggtggccgcgacaccggagcagatcgacgcgttggccgccgacatgcgcgcggcctcggtgcttcggtga

SEQ ID NO: 632 - protein, 577 aa, Mycobacterium tuberculosis
GERRGRDRAAARATDRQDRLLGPTRRALDHRRRRRTRAGRVRRPGLLSELVQAQSQDRHQRRLPPAHHRRRTFLGARACQRVVLHHRDLAIVHPRADPPPAFLLLAALPALRTREGLAGRRAARHGGRRRPAPHPDRGRRRRPRHLQRAAGQAGSQVRRPTQRDPAPQAGPPSRPRGAAQRHRNPHRGDRQLPGLAALHRNAGQRARRRGNPATGHRMPAPARRRGPRGVRRLRGDHPGRRHRGGDQPVGDRSLRRRVAGQTRALAAGIKRQVTLGAVTTVGFDVAARLGTLLTAMVTPFSGDGSLDTATAARLANHLVDQGCDGLVVSGTTGESPTTTDGEKIELLRAVLEAVGDRARVIAGAGTYDTAHSIRLAKACAAEGAHGLLVVTPYYSKPPQRGLQAHFTAVADATELPMLLYDIPGRSAVPIEPDTIRALASHPNIVGVKDAKADLHSGAQIMADTGLAYYSGDDALNLPWLAMGATGFISVIAHLAAGQLRELLSAFGSGDIATARKINIAVAPLCNAMSRLGGVTLSKAGLRLQGIDVGDPRLPQVAATPEQIDALAADMRAASVLR

SEQ ID NO: 633 - DNA, 495 bp, Mycobacterium tuberculosis
  CDS (1)..(495)
gcggtgaactggtgggcccggatggttcaagtacgccgtcgcaaactcgagcacaacaggagacgacggatggaaggagatgctggcgccggccagctgaaccctgccgatgcgaataagtcgtcgtctacggaggtgaaggcggcggattcggcggaatctgacgccggagccgaccagactggcccgcaggtgaaggcggcggattcggcggaatctgacgccggagagctcggcgaggacgcgtgcccagaacaggccctcgtcgagcggcgcccgtcgcggttgcggcgaggctggcttgttggcattgcggcgacgctgctcgcgttggccggtggccttggcgcagcgggttattttgcgttgcgctcacaccaggaaagccaatcaatcgcgcgcgaggaccttgcggccattgaggccgctaaggattgcgttgcggccacgcaggcacccgatgctggggcgatgtcggctagcatgcagaagatc

SEQ ID NO: 634 - protein, 165 aa, Mycobacterium tuberculosis
AVNWWARMVQVRRRKLEHNRRRRMEGDAGAGQLNPADANKSSSTEVKAADSAESDAGADQTGPQVKAADSAESDAGELGEDACPEQALVERRPSRLRRGWLVGIAATLLALAGGLGAAGYFALRSHQESQSIAREDLAAIEAAKDCVAATQAPDAGAMSASMQKI

SEQ ID NO: 635 - DNA, 497 bp, Mycobacterium tuberculosis
  CDS (1)..(6)
  CDS (10)..(99)
  CDS (103)..(138)
  CDS (142)..(195)
  CDS (199)..(495)
cagcggtgaactggtgggcccggatggttcaagtacgccgtcgcaaactcgagcacaacaggagacgacggatggaaggagatgctggcgccggccagctgaaccctgccgatgcgaataagtcgtcgtctacggaggtgaaggcggcggattcggcggaatctgacgccggagccgaccagactggcccgcaggtgaaggcggcggattcggcggaatctgacgccggagagctcggcgaggacgcgtgcccagaacaggccctcgtcgagcggcgcccgtcgcggttgcggcgaggctggcttgttggcattgcggcgacgctgctcgcgttggccggtggccttggcgcagcgggttattttgcgttgcgctcacaccaggaaagccaatcaatcgcgcgcgaggaccttgcggccattgaggccgctaaggattgcgttgcggccacgcaggcacccgatgctggggcgatgtcggctagcatgcagaagatc

SEQ ID NO: 636 - protein, 30 aa, Mycobacterium tuberculosis
TGGPGWFKYAVANSSTTGDDGWKEMLAPAS

SEQ ID NO: 637 - protein, 12 aa, Mycobacterium tuberculosis
TLPMRISRRLRR

SEQ ID NO: 638 - protein, 18 aa, Mycobacterium tuberculosis
RRRIRRNLTPEPTRLARR

SEQ ID NO: 639 - protein, 99 aa, Mycobacterium tuberculosis
RRRIRRNLTPESSARTRAQNRPSSSGARRGCGEAGLLALRRRCSRWPVALAQRVILRCAHTRKANQSRARTLRPLRPLRIALRPRRHPMLGRCRLACRR

SEQ ID NO: 640 - DNA, 496 bp, Mycobacterium tuberculosis
  CDS (1)..(117)
  CDS (121)..(162)
  CDS (166)..(219)
  CDS (223)..(420)
  CDS (424)..(429)
  CDS (433)..(480)
  CDS (484)..(495)
agcggtgaactggtgggcccggatggttcaagtacgccgtcgcaaactcgagcacaacaggagacgacggatggaaggagatgctggcgccggccagctgaaccctgccgatgcgaataagtcgtcgtctacggaggtgaaggcggcggattcggcggaatctgacgccggagccgaccagactggcccgcaggtgaaggcggcggattcggcggaatctgacgccggagagctcggcgaggacgcgtgcccagaacaggccctcgtcgagcggcgcccgtcgcggttgcggcgaggctggcttgttggcattgcggcgacgctgctcgcgttggccggtggccttggcgcagcgggttattttgcgttgcgctcacaccaggaaagccaatcaatcgcgcgcgaggaccttgcggccattgaggccgctaaggattgcgttgcggccacgcaggcacccgatgctggggcgatgtcggctagcatgcagaagatc

SEQ ID NO: 641 - protein, 39 aa, Mycobacterium tuberculosis
SGELVGPDGSSTPSQTRAQQETTDGRRCWRRPAEPCRCE

SEQ ID NO: 642 - protein, 14 aa, Mycobacterium tuberculosis
VVVYGGEGGGFGGI

SEQ ID NO: 643 - protein, 18 aa, Mycobacterium tuberculosis
RRSRPDWPAGEGGGFGGI

SEQ ID NO: 644 - protein, 66 aa, Mycobacterium tuberculosis
RRRARRGRVPRTGPRRAAPVAVAARLACWHCGDAARVGRWPWRSGLFCVALTPGKPINRARGPCGH

SEQ ID NO: 645 - protein, 16 aa, Mycobacterium tuberculosis
GLRCGHAGTRCWGDVG

SEQ ID NO: 646 - protein, 4 aa, Mycobacterium tuberculosis
HAED

SEQ ID NO: 647 - DNA, 642 bp, Mycobacterium tuberculosis
  CDS (1)..(639)
gtgaaggcggcggattcggcggaatctgacgccggagccgaccagactggcccgcaggtgaaggcggcggattcggcggaatctgacgccggagagctcggcgaggacgcgtgcccagaacaggccctcgtcgagcggcgcccgtcgcggttgcggcgaggctggcttgttggcattgcggcgacgctgctcgcgttggccggtggccttggcgcagcgggttattttgcgttgcgctcacaccaggaaagccaatcaatcgcgcgcgaggaccttgcggccattgaggccgctaaggattgcgttgcggccacgcaggcacccgatgctggggcgatgtcggctagcatgcagaagatcatcgagtgtggcaccggtgatttcggtgcccaggcgtcgttgtacaccagcatgctcgtcgaggcgtatcaagcggccagcgtccacgtgcaagtgaccgatatgcgcgcggcggtcgagcgcaacaacaatgacgggtcggtcgatgttctggtggcgctccgggtcaaggtgtccaacaccgactcggatgcccatgaagtcggctaccgtcttcgggtccggatggcactggatgagggccgctataagatcgccaaactcgaccaggtgacgaagtga

SEQ ID NO: 648 - protein, 213 aa, Mycobacterium tuberculosis
VKAADSAESDAGADQTGPQVKAADSAESDAGELGEDACPEQALVERRPSRLRRGWLVGIAATLLALAGGLGAAGYFALRSHQESQSIAREDLAAIEAAKDCVAATQAPDAGAMSASMQKIIECGTGDFGAQASLYTSMLVEAYQAASVHVQVTDMRAAVERNNNDGSVDVLVALRVKVSNTDSDAHEVGYRLRVRMALDEGRYKIAKLDQVTK

SEQ ID NO: 649 - DNA, 774 bp, Mycobacterium tuberculosis
  CDS (4)..(771)
tgaactggtggggccggatggtgtcaagtacgccgtcgcaaactcgagcacaacaggagacgacggatggaaggagatgctggcgccggccagctgaaccctgccgatgcgaataagtcgtcgtctacggaggtgaaggcggcggattcggcggaatctgacgccggagccgaccagactggcccgcaggtgaaggcggcggattcggcggaatctgacgccggagagctcggcgaggacgcgtgcccagaacaggccctcgtcgagcggcgcccgtcgcggttgcggcgaggctggcttgttggcattgcggcgacgctgctcgcgttggccggtggccttggcgcagcgggttattttgcgttgcgctcacaccaggaaagccaatcaatcgcgcgcgaggaccttgcggccattgaggccgctaaggattgcgttgcggccacgcaggcacccgatgctggggcgatgtcggctagcatgcagaagatcatcgagtgtggcaccggtgatttcggtgcccaggcgtcgttgtacaccagcatgctcgtcgaggcgtatcaagcggccagcgtccacgtgcaagtgaccgatatgcgcgcggcggtcgagcgcaacaacaatgacgggtcggtcgatgttctggtggcgctccgggtcaaggtgtccaacaccgactcggatgcccatgaagtcggctaccgtcttcgggtccggatggcactggatgagggccgctataagatcgccaaactcgaccaggtgacgaagtga

SEQ ID NO: 650 - protein, 256 aa, Mycobacterium tuberculosis
TGGAGWCQVRRRKLEHNRRRRMEGDAGAGQLNPADANKSSSTEVKAADSAESDAGADQTGPQVKAADSAESDAGELGEDACPEQALVERRPSRLRRGWLVGIAATLLALAGGLGAAGYFALRSHQESQSIAREDLAAIEAAKDCVAATQAPDAGAMSASMQKIIECGTGDFGAQASLYTSMLVEAYQAASVHVQVTDMRAAVERNNNDGSVDVLVALRVKVSNTDSDAHEVGYRLRVRMALDEGRYKIAKLDQVTK

SEQ ID NO: 651 - DNA, 165 bp, Mycobacterium tuberculosis
  CDS (1)..(165)
acacctccccccccgccgccgctgccgccggttccctttcccaaggaatgtccggcgccgggcgtgatgcaaggctgccttgagagcaccagcggcttgatcatgggcatcgacagcaagaccgcactggtcgccgagcgcatcaccggtgccgtcgaggagatc

SEQ ID NO: 652 - protein, 55 aa, Mycobacterium tuberculosis
TPPPPPPLPPVPFPKECPAPGVMQGCLESTSGLIMGIDSKTALVAERITGAVEEI

SEQ ID NO: 653 - DNA, 164 bp, Mycobacterium tuberculosis
  CDS (1)..(63)
  CDS (67)..(96)
  CDS (100)..(162)
cacctccccccccgccgccgctgccgccggttccctttcccaaggaatgtccggcgccgggcgtgatgcaaggctgccttgagagcaccagcggcttgatcatgggcatcgacagcaagaccgcactggtcgccgagcgcatcaccggtgccgtcgaggagatc

SEQ ID NO: 654 - protein, 21 aa, Mycobacterium tuberculosis
HLPPRRRCRRFPFPRNVRRRA

SEQ ID NO: 655 - protein, 10 aa, Mycobacterium tuberculosis
CKAALRAPAA

SEQ ID NO: 656 - protein, 21 aa, Mycobacterium tuberculosis
SWASTARPHWSPSASPVPSRR

SEQ ID NO: 657 - DNA, 166 bp, Mycobacterium tuberculosis
  CDS (1)..(81)
  CDS (85)..(165)
gacacctccccccccgccgccgctgccgccggttccctttcccaaggaatgtccggcgccgggcgtgatgcaaggctgccttgagagcaccagcggcttgatcatgggcatcgacagcaagaccgcactggtcgccgagcgcatcaccggtgccgtcgaggagatc

SEQ ID NO: 658 - protein, 27 aa, Mycobacterium tuberculosis
DTSPPAAAAAGSLSQGMSGAGRDARLP

SEQ ID NO: 659 - protein, 27 aa, Mycobacterium tuberculosis
EHQRLDHGHRQQDRTGRRAHHRCRRGD

SEQ ID NO: 660 - DNA, 1122 bp, Mycobacterium tuberculosis
  CDS (1)..(1119)
atgtggacaacgcggttggttcgatccggactcgccgcgctgtgcgcggcagtgctggtatcgagcggctgcgcacggttcaacgacgctcaatctcagccgttcaccaccgaaccggagctgcggccccaacccagctcgacacctccccccccgccgccgctgccgccggttccctttcccaaggaatgtccggcgccgggcgtgatgcaaggctgccttgagagcaccagcggcttgatcatgggcatcgacagcaagaccgcactggtcgccgagcgcatcaccggtgccgtcgaggagatctctatcagcgccgagccgaaggtaaagacggtcatccccgtggatcctgccggtgacggtggcttgatggacattgtgctgtcgcccacctactcgcaagaccggctgatgtacgcctacatcagcacgcccaccgacaaccgggtggtgcgagtggccgacggcgacatccccaaggacatcctgaccggcatccccaaaggtgctgccggtaacaccggggcgctgatcttcaccagtcccaccacgctggtcgtgatgaccggggatgctggcgacccggcgttggccgccgatccccaatcgttggccggtaaggtcctgcgtatcgaacagcccaccaccatcggccagacgccgccgacgacggcgctgtctggcatcggctccggcggcggcttgtgcatcgatccggtcgacggctcgctatatgtcgccgaccgcacgccaacggcggaccgattgcagcgcatcaccaagaactcggaggtctctacggtatggacctggccggacaagcccggcgtggccgggtgtgccgcgatggacggcaccgtgctggtcaacctgattaataccaaactgacggtggcggtccggctcgcgccgtcgaccggtgcggtcaccggagaacccgacgttgtccgcaaagacactcatgcgcatgcgtgggcattacggatgtcgccggacggcaacgtctggggagccaccgtcaacaagaccgccggcgacgccgagaagctcgacgatgtggtgttcccgctgttcccgcagggtggcggcttcccgcgcaacaacgacgacaagacctga

SEQ ID NO: 661 - protein, 373 aa, Mycobacterium tuberculosis
MWTTRLVRSGLAALCAAVLVSSGCARFNDAQSQPFTTEPELRPQPSSTPPPPPPLPPVPFPKECPAPGVMQGCLESTSGLIMGIDSKTALVAERITGAVEEISISAEPKVKTVIPVDPAGDGGLMDIVLSPTYSQDRLMYAYISTPTDNRVVRVADGDIPKDILTGIPKGAAGNTGALIFTSPTTLVVMTGDAGDPALAADPQSLAGKVLRIEQPTTIGQTPPTTALSGIGSGGGLCIDPVDGSLYVADRTPTADRLQRITKNSEVSTVWTWPDKPGVAGCAAMDGTVLVNLINTKLTVAVRLAPSTGAVTGEPDVVRKDTHAHAWALRMSPDGNVWGATVNKTAGDAEKLDDVVFPLFPQGGGFPRNNDDKT

SEQ ID NO: 662 - DNA, 1287 bp, Mycobacterium tuberculosis
  CDS (4)..(1284)
taaggccatttagtgccgaattggggatttgagcggcgctttcgccagacaatccgcacattgaccctgaccagcccaccaaaaggccccaattgggccgccatgccgacagtgcgcaccccggcaggtggcggcgatgcccacaatgtccgtagcctgtcggtcatgtggacaacgcggttggttcgatccggactcgccgcgctgtgcgcggcagtgctggtatcgagcggctgcgcacggttcaacgacgctcaatctcagccgttcaccaccgaaccggagctgcggccccaacccagctcgacacctccccccccgccgccgctgccgccggttccctttcccaaggaatgtccggcgccgggcgtgatgcaaggctgccttgagagcaccagcggcttgatcatgggcatcgacagcaagaccgcactggtcgccgagcgcatcaccggtgccgtcgaggagatctctatcagcgccgagccgaaggtaaagacggtcatccccgtggatcctgccggtgacggtggcttgatggacattgtgctgtcgcccacctactcgcaagaccggctgatgtacgcctacatcagcacgcccaccgacaaccgggtggtgcgagtggccgacggcgacatccccaaggacatcctgaccggcatccccaaaggtgctgccggtaacaccggggcgctgatcttcaccagtcccaccacgctggtcgtgatgaccggggatgctggcgacccggcgttggccgccgatccccaatcgttggccggtaaggtcctgcgtatcgaacagcccaccaccatcggccagacgccgccgacgacggcgctgtctggcatcggctccggcggcggcttgtgcatcgatccggtcgacggctcgctatatgtcgccgaccgcacgccaacggcggaccgattgcagcgcatcaccaagaactcggaggtctctacggtatggacctggccggacaagcccggcgtggccgggtgtgccgcgatggacggcaccgtgctggtcaacctgattaataccaaactgacggtggcggtccggctcgcgccgtcgaccggtgcggtcaccggagaacccgacgttgtccgcaaagacactcatgcgcatgcgtgggcattacggatgtcgccggacggcaacgtctggggagccaccgtcaacaagaccgccggcgacgccgagaagctcgacgatgtggtgttcccgctgttcccgcagggtggcggcttcccgcgcaacaacgacgacaagacctga

SEQ ID NO: 663 - protein, 427 aa, Mycobacterium tuberculosis
GHLVPNWGFERRFRQTIRTLTLTSPPKGPNWAAMPTVRTPAGGGDAHNVRSLSVMWTTRLVRSGLAALCAAVLVSSGCARFNDAQSQPFTTEPELRPQPSSTPPPPPPLPPVPFPKECPAPGVMQGCLESTSGLIMGIDSKTALVAERITGAVEEISISAEPKVKTVIPVDPAGDGGLMDIVLSPTYSQDRLMYAYISTPTDNRVVRVADGDIPKDILTGIPKGAAGNTGALIFTSPTTLVVMTGDAGDPALAADPQSLAGKVLRIEQPTTIGQTPPTTALSGIGSGGGLCIDPVDGSLYVADRTPTADRLQRITKNSEVSTVWTWPDKPGVAGCAAMDGTVLVNLINTKLTVAVRLAPSTGAVTGEPDVVRKDTHAHAWALRMSPDGNVWGATVNKTAGDAEKLDDVVFPLFPQGGGFPRNNDDKT

SEQ ID NO: 664 - DNA, 334 bp, Mycobacterium tuberculosis
  CDS (1)..(186)
  CDS (190)..(333)
gaaggccttgttgagccggcgcacgaaaacgatcgttgtgtgtacattggtgtgtatggctcggttgaacgtgtatgtgcccgacgaattggcggagcgcgccagggcgcggggcttgaacgtctcggcgctgactcaggccgcgatcagtgccgagttggagaactccgcaaccgatgcgtggcttgaggggttggaacccagaagcaccggcgctcggcatgatgacgtgctgggtgcgatcgatgccgctcgcgatgagttcgaagcgtgagagcatcgcccacttcgccgccggagcaggtggtcgtcgacgcgagtgccatggtggatc

SEQ ID NO: 665 - protein, 62 aa, Mycobacterium tuberculosis
EGLVEPAHENDRCVYIGVYGSVERVCARRIGGARQGAGLERLGADSGRDQCRVGELRNRCVA

SEQ ID NO: 666 - DNA, 333 bp, Mycobacterium tuberculosis
  CDS (1)..(270)
  CDS (274)..(333)
aaggccttgttgagccggcgcacgaaaacgatcgttgtgtgtacattggtgtgtatggctcggttgaacgtgtatgtgcccgacgaattggcggagcgcgccagggcgcggggcttgaacgtctcggcgctgactcaggccgcgatcagtgccgagttggagaactccgcaaccgatgcgtggcttgaggggttggaacccagaagcaccggcgctcggcatgatgacgtgctgggtgcgatcgatgccgctcgcgatgagttcgaagcgtgagagcatcgcccacttcgccgccggagcaggtggtcgtcgacgcgagtgccatggtggatc

SEQ ID NO: 667 - protein, 90 aa, Mycobacterium tuberculosis
KALLSRRTKTIVVCTLVCMARLNVYVPDELAERARARGLNVSALTQAAISAELENSATDAWLEGLEPRSTGARHDDVLGAIDAARDEFEA

SEQ ID NO: 668 - protein, 20 aa, Mycobacterium tuberculosis
EHRPLRRRSRWSSTRVPWWI

SEQ ID NO: 669 - DNA, 332 bp, Mycobacterium tuberculosis
  CDS (1)..(9)
  CDS (13)..(63)
  CDS (67)..(114)
  CDS (118)..(129)
  CDS (133)..(331)
aggccttgttgagccggcgcacgaaaacgatcgttgtgtgtacattggtgtgtatggctcggttgaacgtgtatgtgcccgacgaattggcggagcgcgccagggcgcggggcttgaacgtctcggcgctgactcaggccgcgatcagtgccgagttggagaactccgcaaccgatgcgtggcttgaggggttggaacccagaagcaccggcgctcggcatgatgacgtgctgggtgcgatcgatgccgctcgcgatgagttcgaagcgtgagagcatcgcccacttcgccgccggagcaggtggtcgtcgacgcgagtgccatggtggatc

SEQ ID NO: 670 - protein, 17 aa, Mycobacterium tuberculosis
AGARKRSLCVHWCVWLG

SEQ ID NO: 671 - protein, 16 aa, Mycobacterium tuberculosis
TCMCPTNWRSAPGRGA

SEQ ID NO: 672 - protein, 4 aa, Mycobacterium tuberculosis
TSRR

SEQ ID NO: 673 - protein, 66 aa, Mycobacterium tuberculosis
LRPRSVPSWRTPQPMRGLRGWNPEAPALGMMTCWVRSMPLAMSSKRESIAHFAAGAGGRRRECHGG

SEQ ID NO: 674 - DNA, 414 bp, Mycobacterium tuberculosis
  CDS (1)..(411)
gtgagagcatcgcccacttcgccgccggagcaggtggtcgtcgacgcgagtgccatggtggatctactggctcgcactagcgatcggtgctctgcggtgcgcgcgcggctggctcggaccgcgatgcacgcgccggcgcacttcgatgcagaggtgttgtcggcgctggggcgcatgcagcgcgccggcgcactcaccgttgcctatgtcgatgcggcactggaggagttgcgacaggtgccggtgactcgacacggtctttcgtcgctgcttgctggagcgtggtcgcgccgcgacaccctccgcctgaccgatgccctctacgtcgagctggccgaaacggcaggtctggtgttgttgaccaccgacgaaagattggcacgcgcctggccctcggctcacgccatcggctga

SEQ ID NO: 675 - protein, 137 aa, Mycobacterium tuberculosis
VRASPTSPPEQVVVDASAMVDLLARTSDRCSAVRARLARTAMHAPAHFDAEVLSALGRMQRAGALTVAYVDAALEELRQVPVTRHGLSSLLAGAWSRRDTLRLTDALYVELAETAGLVLLTTDERLARAWPSAHAIG

SEQ ID NO: 676 - DNA, 426 bp, Mycobacterium tuberculosis
  CDS (4)..(423)
tgagttcgaagcgtgagagcatcgcccacttcgccgccggagcaggtggtcgtcgacgcgagtgccatggtggatctactggctcgcactagcgatcggtgctctgcggtgcgcgcgcggctggctcggaccgcgatgcacgcgccggcgcacttcgatgcagaggtgttgtcggcgctggggcgcatgcagcgcgccggcgcactcaccgttgcctatgtcgatgcggcactggaggagttgcgacaggtgccggtgactcgacacggtctttcgtcgctgcttgctggagcgtggtcgcgccgcgacaccctccgcctgaccgatgccctctacgtcgagctggccgaaacggcaggtctggtgttgttgaccaccgacgaaagattggcacgcgcctggccctcggctcacgccatcggctga

SEQ ID NO: 677 - protein, 140 aa, Mycobacterium tuberculosis
VRSVRASPTSPPEQVVVDASAMVDLLARTSDRCSAVRARLARTAMHAPAHFDAEVLSALGRMQRAGALTVAYVDAALEELRQVPVTRHGLSSLLAGAWSRRDTLRLTDALYVELAETAGLVLLTTDERLARAWPSAHAIG

SEQ ID NO: 678 - DNA, 277 bp, Mycobacterium tuberculosis
  CDS (1)..(21)
  CDS (25)..(42)
  CDS (46)..(150)
  CDS (154)..(276)
cctggccgggacgcctacgtgtagcccgcggctagcacaggatagccattgttgtgcggtagcgccaaaacgatcagcccttcgcggacatgtcagcacccgccttggccgggagagcggcgtcgtgaccgtgctgtcaccacgtctggttaggctcggggcgcgggctggcgcggaggaggtgtgttgcggaggaggtgtgttgtagtggggacggcggatcggccgttggacgcctcggccttgcgggactgggcacacgccgtcgtcagcgatc

SEQ ID NO: 679 - protein, 7 aa, Mycobacterium tuberculosis
PGRDAYV

SEQ ID NO: 680 - protein, 6 aa, Mycobacterium tuberculosis
PAASTG

SEQ ID NO: 681 - protein, 35 aa, Mycobacterium tuberculosis
PLLCGSAKTISPSRTCQHPPWPGERRRDRAVTTSG

SEQ ID NO: 682 - protein, 41 aa, Mycobacterium tuberculosis
ARGAGWRGGGVLRRRCVVVGTADRPLDASALRDWAHAVVSD

SEQ ID NO: 683 - DNA, 276 bp, Mycobacterium tuberculosis
  CDS (1)..(204)
  CDS (208)..(276)
ctggccgggacgcctacgtgtagcccgcggctagcacaggatagccattgttgtgcggtagcgccaaaacgatcagcccttcgcggacatgtcagcacccgccttggccgggagagcggcgtcgtgaccgtgctgtcaccacgtctggttaggctcggggcgcgggctggcgcggaggaggtgtgttgcggaggaggtgtgttgtagtggggacggcggatcggccgttggacgcctcggccttgcgggactgggcacacgccgtcgtcagcgatc

SEQ ID NO: 684 - protein, 68 aa, Mycobacterium tuberculosis
LAGTPTCSPRLAQDSHCCAVAPKRSALRGHVSTRLGRESGVVTVLSPRLVRLGARAGAEEVCCGGGVL

SEQ ID NO: 685 - protein, 23 aa, Mycobacterium tuberculosis
WGRRIGRWTPRPCGTGHTPSSAI

SEQ ID NO: 686 - DNA, 275 bp, Mycobacterium tuberculosis
  CDS (1)..(30)
  CDS (34)..(57)
  CDS (61)..(123)
  CDS (127)..(273)
tggccgggacgcctacgtgtagcccgcggctagcacaggatagccattgttgtgcggtagcgccaaaacgatcagcccttcgcggacatgtcagcacccgccttggccgggagagcggcgtcgtgaccgtgctgtcaccacgtctggttaggctcggggcgcgggctggcgcggaggaggtgtgttgcggaggaggtgtgttgtagtggggacggcggatcggccgttggacgcctcggccttgcgggactgggcacacgccgtcgtcagcgatc

SEQ ID NO: 687 - protein, 10 aa, Mycobacterium tuberculosis
WPGRLRVARG

SEQ ID NO: 688 - protein, 8 aa, Mycobacterium tuberculosis
HRIAIVVR

SEQ ID NO: 689 - protein, 21 aa, Mycobacterium tuberculosis
RQNDQPFADMSAPALAGRAAS

SEQ ID NO: 690 - protein, 49 aa, Mycobacterium tuberculosis
PCCHHVWLGSGRGLARRRCVAEEVCCSGDGGSAVGRLGLAGLGTRRRQR

SEQ ID NO: 691 - DNA, 255 bp, Mycobacterium tuberculosis
  CDS (1)..(252)
gtggggacggcggatcggccgttggacgcctcggccttgcgggactgggcacacgccgtcgtcagcgatctgatcctccacatcgacgagatcaaccggctcaatgtgttcccggtcgctgactccgataccggcgtcaacatgctgttcaccatgcgtgccgcggtcgtagaagctgatttgcacgcgaattcgcaggctgacgccgaagacgtggcgcgggttgcggccgctctcgcggccggcgcgcgttga

SEQ ID NO: 692 - protein, 84 aa, Mycobacterium tuberculosis
VGTADRPLDASALRDWAHAVVSDLILHIDEINRLNVFPVADSDTGVNMLFTMRAAVVEADLHANSQADAEDVARVAAALAAGAR

SEQ ID NO: 693 - DNA, 312 bp, Mycobacterium tuberculosis
  CDS (4)..(309)
taggctcggggcgcgggctggcgcggaggaggtgtgttgcggaggaggtgtgttgtagtggggacggcggatcggccgttggacgcctcggccttgcgggactgggcacacgccgtcgtcagcgatctgatcctccacatcgacgagatcaaccggctcaatgtgttcccggtcgctgactccgataccggcgtcaacatgctgttcaccatgcgtgccgcggtcgtagaagctgatttgcacgcgaattcgcaggctgacgccgaagacgtggcgcgggttgcggccgctctcgcggccggcgcgcgttga

SEQ ID NO: 694 - protein, 102 aa, Mycobacterium tuberculosis
ARGAGWRGGGVLRRRCVVVGTADRPLDASALRDWAHAVVSDLILHIDEINRLNVFPVADSDTGVNMLFTMRAAVVEADLHANSQADAEDVARVAAALAAGAR

SEQ ID NO: 695 - DNA, 1413 bp, Mycobacterium tuberculosis
  CDS (1)..(1410)
ttgaacggagctcgcggcaactccggcgtgatcctgtcccagatcctgcgcgggatcgcagaggtgaccgcgactgcggccgccgcctctggcgcggtattgcgggcggtcgacgccaacgccctcggggccgcgttgtggcgcggcgtcgagttggtcgtcgcgtcgatgggtggcgtggaggtgccgggaactatcgtctcggtgctgcgggccgccgccggagccgtcgaccagtgcgcgcacgaggggttggccggtgcggtcaccgccgccggtgacgcggcggtcatcgcgctggaaaagacccccgaacagcttgacgtgctcgccgatgcgggcgcggtggacgccggcggacggggcctgctggttctgctggacgcgttgcgctccaccatctgcgggcaggcacctgcccgggcggtctacgaaccctcgccgcgcgcgttgccgaccgacacggctacccaacgccccgccccgcaattcgaggtgatgtatctgttggcggtatgtgatgctgcagcggcggaccagttgcgggatcgactcaaggaattgggtgagtcggtggccatcgccgctgctccgcccgacagctactccgtacacgtccacaccgacgacgccggtgccgccgtggaagccggattggcggtggggcgagttagccggatcgtgatctcggcgctcggttccgggaccagcggattgccggccggtggctggacgcggggccgcgccgtgctggcggtcgtcgacggcgacggtgccgccgagctgttcgccggggagggcgcctgcgtgctgcgaccgggtccagacgccgtgacaccggccgccgatatcagtgcccaccagctggtgcgggccgtggtagacaccggcgccgcgcacgtgatggtgctgcccaatggctatgtggccgccgaagaactggtggccgggtgtaccgcggcgatcggctggggcgtcgacgtggtacccgtgccgaccggatcgatggtgcaggggttggccgcgctggccgtgcatgacgcggcccgccaggccgtcgacgacggctacagcatggcccgtgccgccggtgcttcccggcacggatcggtgcgcattgccacccaaaaggcgctgacctgggccggtacctgcaagccgggcgacggtctgggtatcgcgggcgacgaggtgctgatcgtcgccgacgatgtcgccgcggcggccatcggtctggtcgacctgttgttggcatcgggaggcgatctggtgacggtgctaattggcgccggcgtaaccgaagacgtggctgtcgtcctggaacggcatgtgcacgaccaccatccaggcaccgagctggtctcctaccgcaccggacaccgcggcgacgcgctgctgatcggggtcgagtag

SEQ ID NO: 696 - protein, 470 aa, Mycobacterium tuberculosis
LNGARGNSGVILSQILRGIAEVTATAAAASGAVLRAVDANALGAALWRGVELVVASMGGVEVPGTIVSVLRAAAGAVDQCAHEGLAGAVTAAGDAAVIALEKTPEQLDVLADAGAVDAGGRGLLVLLDALRSTICGQAPARAVYEPSPRALPTDTATQRPAPQFEVMYLLAVCDAAAADQLRDRLKELGESVAIAAAPPDSYSVHVHTDDAGAAVEAGLAVGRVSRIVISALGSGTSGLPAGGWTRGRAVLAVVDGDGAAELFAGEGACVLRPGPDAVTPAADISAHQLVRAVVDTGAAHVMVLPNGYVAAEELVAGCTAAIGWGVDVVPVPTGSMVQGLAALAVHDAARQAVDDGYSMARAAGASRHGSVRIATQKALTWAGTCKPGDGLGIAGDEVLIVADDVAAAAIGLVDLLLASGGDLVTVLIGAGVTEDVAVVLERHVHDHHPGTELVSYRTGHRGDALLIGVE

SEQ ID NO: 697 - DNA, 1722 bp, Mycobacterium tuberculosis
  CDS (1)..(177)
  CDS (181)..(234)
  CDS (238)..(258)
  CDS (262)..(1719)
ttaggctcggggcgcgggctggcgcggaggaggtgtgttgcggaggaggtgtgttgtagtggggacggcggatcggccgttggacgcctcggccttgcgggactgggcacacgccgtcgtcagcgatctgatcctccacatcgacgagatcaaccggctcaatgtgttcccggtcgctgactccgataccggcgtcaacatgctgttcaccatgcgtgccgcggtcgtagaagctgatttgcacgcgaattcgcaggctgacgccgaagacgtggcgcgggttgcggccgctctcgcggccggcgcgcgttgaacggagctcgcggcaactccggcgtgatcctgtcccagatcctgcgcgggatcgcagaggtgaccgcgactgcggccgccgcctctggcgcggtattgcgggcggtcgacgccaacgccctcggggccgcgttgtggcgcggcgtcgagttggtcgtcgcgtcgatgggtggcgtggaggtgccgggaactatcgtctcggtgctgcgggccgccgccggagccgtcgaccagtgcgcgcacgaggggttggccggtgcggtcaccgccgccggtgacgcggcggtcatcgcgctggaaaagacccccgaacagcttgacgtgctcgccgatgcgggcgcggtggacgccggcggacggggcctgctggttctgctggacgcgttgcgctccaccatctgcgggcaggcacctgcccgggcggtctacgaaccctcgccgcgcgcgttgccgaccgacacggctacccaacgccccgccccgcaattcgaggtgatgtatctgttggcggtatgtgatgctgcagcggcggaccagttgcgggatcgactcaaggaattgggtgagtcggtggccatcgccgctgctccgcccgacagctactccgtacacgtccacaccgacgacgccggtgccgccgtggaagccggattggcggtggggcgagttagccggatcgtgatctcggcgctcggttccgggaccagcggattgccggccggtggctggacgcggggccgcgccgtgctggcggtcgtcgacggcgacggtgccgccgagctgttcgccggggagggcgcctgcgtgctgcgaccgggtccagacgccgtgacaccggccgccgatatcagtgcccaccagctggtgcgggccgtggtagacaccggcgccgcgcacgtgatggtgctgcccaatggctatgtggccgccgaagaactggtggccgggtgtaccgcggcgatcggctggggcgtcgacgtggtacccgtgccgaccggatcgatggtgcaggggttggccgcgctggccgtgcatgacgcggcccgccaggccgtcgacgacggctacagcatggcccgtgccgccggtgcttcccggcacggatcggtgcgcattgccacccaaaaggcgctgacctgggccggtacctgcaagccgggcgacggtctgggtatcgcgggcgacgaggtgctgatcgtcgccgacgatgtcgccgcggcggccatcggtctggtcgacctgttgttggcatcgggaggcgatctggtgacggtgctaattggcgccggcgtaaccgaagacgtggctgtcgtcctggaacggcatgtgcacgaccaccatccaggcaccgagctggtctcctaccgcaccggacaccgcggcgacgcgctgctgatcggggtcgagtag

SEQ ID NO: 698 - protein, 59 aa, Mycobacterium tuberculosis
LGSGRGLARRRCVAEEVCCSGDGGSAVGRLGLAGLGTRRRQRSDPPHRRDQPAQCVPGR

SEQ ID NO: 699 - protein, 18 aa, Mycobacterium tuberculosis
LRYRRQHAVHHACRGRRS

SEQ ID NO: 700 - protein, 7 aa, Mycobacterium tuberculosis
FAREFAG

SEQ ID NO: 701 - protein, 486 aa, Mycobacterium tuberculosis
RRRRGAGCGRSRGRRALNGARGNSGVILSQILRGIAEVTATAAAASGAVLRAVDANALGAALWRGVELVVASMGGVEVPGTIVSVLRAAAGAVDQCAHEGLAGAVTAAGDAAVIALEKTPEQLDVLADAGAVDAGGRGLLVLLDALRSTICGQAPARAVYEPSPRALPTDTATQRPAPQFEVMYLLAVCDAAAADQLRDRLKELGESVAIAAAPPDSYSVHVHTDDAGAAVEAGLAVGRVSRIVISALGSGTSGLPAGGWTRGRAVLAVVDGDGAAELFAGEGACVLRPGPDAVTPAADISAHQLVRAVVDTGAAHVMVLPNGYVAAEELVAGCTAAIGWGVDVVPVPTGSMVQGLAALAVHDAARQAVDDGYSMARAAGASRHGSVRIATQKALTWAGTCKPGDGLGIAGDEVLIVADDVAAAAIGLVDLLLASGGDLVTVLIGAGVTEDVAVVLERHVHDHHPGTELVSYRTGHRGDALLIGVE

SEQ ID NO: 702 - DNA, 1722 bp, Mycobacterium tuberculosis; identical to SEQ ID NO: 697
  CDS (5)..(310)
  CDS (314)..(337)
  CDS (341)..(373)
  CDS (377)..(805)
  CDS (809)..(991)
  CDS (995)..(1141)
  CDS (1145)..(1189)
  CDS (1193)..(1210)
  CDS (1214)..(1444)
  CDS (1448)..(1504)
  CDS (1508)..(1579)
  CDS (1583)..(1588)
  CDS (1592)..(1603)
  CDS (1607)..(1720)

SEQ ID NO: 703 - protein, 102 aa, Mycobacterium tuberculosis; identical to SEQ ID NO: 694

SEQ ID NO: 704 - protein, 8 aa, Mycobacterium tuberculosis
TELAATPA

SEQ ID NO: 705 - protein, 11 aa, Mycobacterium tuberculosis
SCPRSCAGSQR

SEQ ID NO: 706 - protein, 143 aa, Mycobacterium tuberculosis
PRLRPPPLARYCGRSTPTPSGPRCGAASSWSSRRWVAWRCRELSSRCCGPPPEPSTSARTRGWPVRSPPPVTRRSSRWKRPPNSLTCSPMRARWTPADGACWFCWTRCAPPSAGRHLPGRSTNPRRARCRPTRLPNAPPRNSR

SEQ ID NO: 707 - protein, 61 aa, Mycobacterium tuberculosis
CICWRYVMLQRRTSCGIDSRNWVSRWPSPLLRPTATPYTSTPTTPVPPWKPDWRWGELAGS

SEQ ID NO: 708 - protein, 49 aa, Mycobacterium tuberculosis
SRRSVPGPADCRPVAGRGAAPCWRSSTATVPPSCSPGRAPACCDRVQTP

SEQ ID NO: 709 - protein, 15 aa, Mycobacterium tuberculosis
HRPPISVPTSWCGPW

SEQ ID NO: 710 - protein, 6 aa, Mycobacterium tuberculosis
TPAPRT

SEQ ID NO: 711 - protein, 77 aa, Mycobacterium tuberculosis
WCCPMAMWPPKNWWPGVPRRSAGASTWYPCRPDRWCRGWPRWPCMTRPARPSTTATAWPVPPVLPGTDRCALPPKRR

SEQ ID NO: 712 - protein, 19 aa, Mycobacterium tuberculosis
PGPVPASRATVWVSRATRC

SEQ ID NO: 713 - protein, 24 aa, Mycobacterium tuberculosis
SSPTMSPRRPSVWSTCCWHREAIW

SEQ ID NO: 714 - protein, 4 aa, Mycobacterium tuberculosis
LAPA

SEQ ID NO: 715 - protein, 33 aa, Mycobacterium tuberculosis
PKTWLSSWNGMCTTTIQAPSWSPTAPDTAATRC

SEQ ID NO: 716 - protein, 4 aa, Mycobacterium tuberculosis
SGSS

SEQ ID NO: 717 - DNA, 1722 bp, Mycobacterium tuberculosis; identical to SEQ ID NO: 697
  CDS (3)..(56)
  CDS (60)..(128)
  CDS (132)..(227)
  CDS (231)..(587)
  CDS (591)..(629)
  CDS (633)..(827)
  CDS (831)..(875)
  CDS (879)..(980)
  CDS (984)..(1346)
  CDS (1350)..(1721)

SEQ ID NO: 718 - protein, 18 aa, Mycobacterium tuberculosis
RLGARAGAEEVCCGGGVL

SEQ ID NO: 719 - protein, 23 aa, Mycobacterium tuberculosis
WGRRIGRWTPRPCGTGHTPSSAI

SEQ ID NO: 720 - protein, 32 aa, Mycobacterium tuberculosis
SSTSTRSTGSMCSRSLTPIPASTCCSPCVPRS

SEQ ID NO: 721 - protein, 119 aa, Mycobacterium tuberculosis
KLICTRIRRLTPKTWRGLRPLSRPARVERSSRQLRRDPVPDPARDRRGDRDCGRRLWRGIAGGRRQRPRGRVVARRRVGRRVDGWRGGAGNYRLGAAGRRRSRRPVRARGVGRCGHRRR

SEQ ID NO: 722 - protein, 13 aa, Mycobacterium tuberculosis
RGGHRAGKDPRTA

SEQ ID NO: 723 - protein, 65 aa, Mycobacterium tuberculosis
RARRCGRGGRRRTGPAGSAGRVALHHLRAGTCPGGLRTLAARVADRHGYPTPRPAIRGDVSVGGM

SEQ ID NO: 724 - protein, 15 aa, Mycobacterium tuberculosis
CCSGGPVAGSTQGIG

SEQ ID NO: 725 - protein, 34 aa, Mycobacterium tuberculosis
VGGHRRCSARQLLRTRPHRRRRCRRGSRIGGGAS

SEQ ID NO: 726 - protein, 121 aa, Mycobacterium tuberculosis
PDRDLGARFRDQRIAGRWLDAGPRRAGGRRRRRCRRAVRRGGRLRAATGSRRRDTGRRYQCPPAGAGRGRHRRRARDGAAQWLCGRRRTGGRVYRGDRLGRRRGTRADRIDGAGVGRAGRA

SEQ ID NO: 727 - protein, 124 aa, Mycobacterium tuberculosis
RGPPGRRRRLQHGPCRRCFPARIGAHCHPKGADLGRYLQAGRRSGYRGRRGADRRRRCRRGGHRSGRPVVGIGRRSGDGANWRRRNRRRGCRPGTACARPPSRHRAGLLPHRTPRRRAADRGRV

SEQ ID NO: 728 - DNA, 403 bp, Mycobacterium tuberculosis
  CDS (1)..(255)
  CDS (265)..(276)
  CDS (280)..(330)
  CDS (334)..(402)
gccggtaacgccgcgtcccagtgctatccgtccgccggaccgcccgaaacatcagcggcgggcgccccggtcggccgcggccgggctcgacccgctccacctggccatcagcgaccaggttatcgaggtggaagcggacggtgttgggatgcacgcccaacttgccggcgatcgcggcgatgctcatcggaacccgcgacgcacacaatgcccgcagcaccgcacgacggcgccccaccggctcttgcagtgacctgatgatgacactcacccccataaggctcgtcggctgcgcctgagcaatgcagtaagtttacacaaacggacttgtaaaaacctgcggaggtggggtctatggccaacaaacgtggcaatgccgggcagcctctgcccttgtcggatc

SEQ ID NO: 729 - protein, 85 aa, Mycobacterium tuberculosis
AGNAASQCYPSAGPPETSAAGAPVGRGRARPAPPGHQRPGYRGGSGRCWDARPTCRRSRRCSSEPATHTMPAAPHDGAPPALAVT

SEQ ID NO: 730 - protein, 4 aa, Mycobacterium tuberculosis
HSPP

SEQ ID NO: 731 - protein, 17 aa, Mycobacterium tuberculosis
GSSAAPEQCSKFTQTDL

SEQ ID NO: 732 - protein, 23 aa, Mycobacterium tuberculosis
KPAEVGSMANKRGNAGQPLPLSD

SEQ ID NO: 733 - DNA, 402 bp, Mycobacterium tuberculosis
  CDS (1)..(249)
  CDS (253)..(402)
ccggtaacgccgcgtcccagtgctatccgtccgccggaccgcccgaaacatcagcggcgggcgccccggtcggccgcggccgggctcgacccgctccacctggccatcagcgaccaggttatcgaggtggaagcggacggtgttgggatgcacgcccaacttgccggcgatcgcggcgatgctcatcggaacccgcgacgcacacaatgcccgcagcaccgcacgacggcgccccaccggctcttgcagtgacctgatgatgacactcacccccataaggctcgtcggctgcgcctgagcaatgcagtaagtttacacaaacggacttgtaaaaacctgcggaggtggggtctatggccaacaaacgtggcaatgccgggcagcctctgcccttgtcggatc

SEQ ID NO: 734 - protein, 83 aa, Mycobacterium tuberculosis
PVTPRPSAIRPPDRPKHQRRAPRSAAAGLDPLHLAISDQVIEVEADGVGMHAQLAGDRGDAHRNPRRTQCPQHRTTAPHRLLQ

SEQ ID NO: 735 - protein, 50 aa, Mycobacterium tuberculosis
PDDDTHPHKARRLRLSNAVSLHKRTCKNLRRWGLWPTNVAMPGSLCPCRI

SEQ ID NO: 736 - DNA, 401 bp, Mycobacterium tuberculosis
  CDS (1)..(3)
  CDS (7)..(294)
  CDS (298)..(306)
  CDS (310)..(399)
cggtaacgccgcgtcccagtgctatccgtccgccggaccgcccgaaacatcagcggcgggcgccccggtcggccgcggccgggctcgacccgctccacctggccatcagcgaccaggttatcgaggtggaagcggacggtgttgggatgcacgcccaacttgccggcgatcgcggcgatgctcatcggaacccgcgacgcacacaatgcccgcagcaccgcacgacggcgccccaccggctcttgcagtgacctgatgatgacactcacccccataaggctcgtcggctgcgcctgagcaatgcagtaagtttacacaaacggacttgtaaaaacctgcggaggtggggtctatggccaacaaacgtggcaatgccgggcagcctctgcccttgtcggatc

SEQ ID NO: 737 - protein, 96 aa, Mycobacterium tuberculosis
RRVPVLSVRRTARNISGGRPGRPRPGSTRSTWPSATRLSRWKRTVLGCTPNLPAIAAMLIGTRDAHNARSTARRRPTGSCSDLMMTLTPIRLVGCA

SEQ ID NO: 738 - protein, 30 aa, Mycobacterium tuberculosis
VYTNGLVKTCGGGVYGQQTWQCRAASALVG

SEQ ID NO: 739 - DNA, 822 bp, Mycobacterium tuberculosis
  CDS (1)..(819)
atggccaacaaacgtggcaatgccgggcagcctctgcccttgtcggatcgagacgacgaccacatgcaggggcactggctgctggcccggctgggcaagcgggtgctgcgtcccggcggcgtcgaactcacccggacactgctggcccgcgccgaggtgaccgacgccgacgtgctcgagctggcaccgggcctgggccgcaccgcagccgaaatcttggcccgcaacccgcggtcgtacgtgggggcggagagcgatcccaacgcggccaacctggtccgacacgttctcgccggccgcggcgacgtccgggtcaccgacgcggccgataccggattatccgacgccagcgccgatgtcgtcatcggcgaggcgatgctgaccatgcaaggcaacgcggctaaacacacgatcgtcgccgaggcggcgcgggtgctgaggccgggtggccgctacgcgattcacgaactagcgctggtgccggacgacgtcgcagagcaggtccgcaccgacctgcggcagtcgctggcccgcgcgctcaaggtcaatgcgcgtccgctgaccgttgcggaatggtcgcacctcttagcgggccatggactggtcgtcgaacacgttgtcaccgcttccatggcgttgttacaaccgcgacgggtgatcgctgacgaaggcctcctgggtgcgctgcggttcgccggaaacctgctcatccatcgtgccgcgcgtcggcgagtcctgttgatgcgccacacattccgcaggcatcgtgaacgcttgacagccgtcgccattgtcgcgcacaaaccgcacgtcgattcgtga

SEQ ID NO: 740 - protein, 273 aa, Mycobacterium tuberculosis
MANKRGNAGQPLPLSDRDDDHMQGHWLLARLGKRVLRPGGVELTRTLLARAEVTDADVLELAPGLGRTAAEILARNPRSYVGAESDPNAANLVRHVLAGRGDVRVTDAADTGLSDASADVVIGEAMLTMQGNAAKHTIVAEAARVLRPGGRYAIHELALVPDDVAEQVRTDLRQSLARALKVNARPLTVAEWSHLLAGHGLVVEHVVTASMALLQPRRVIADEGLLGALRFAGNLLIHRAARRRVLLMRHTFRRHRERLTAVAIVAHKPHVDS

SEQ ID NO: 741 - DNA, 846 bp, Mycobacterium tuberculosis
  CDS (4)..(843)
taaaaacctgcggaggtggggtctatggccaacaaacgtggcaatgccgggcagcctctgcccttgtcggatcgagacgacgaccacatgcaggggcactggctgctggcccggctgggcaagcgggtgctgcgtcccggcggcgtcgaactcacccggacactgctggcccgcgccgaggtgaccgacgccgacgtgctcgagctggcaccgggcctgggccgcaccgcagccgaaatcttggcccgcaacccgcggtcgtacgtgggggcggagagcgatcccaacgcggccaacctggtccgacacgttctcgccggccgcggcgacgtccgggtcaccgacgcggccgataccggattatccgacgccagcgccgatgtcgtcatcggcgaggcgatgctgaccatgcaaggcaacgcggctaaacacacgatcgtcgccgaggcggcgcgggtgctgaggccgggtggccgctacgcgattcacgaactagcgctggtgccggacgacgtcgcagagcaggtccgcaccgacctgcggcagtcgctggcccgcgcgctcaaggtcaatgcgcgtccgctgaccgttgcggaatggtcgcacctcttagcgggccatggactggtcgtcgaacacgttgtcaccgcttccatggcgttgttacaaccgcgacgggtgatcgctgacgaaggcctcctgggtgcgctgcggttcgccggaaacctgctcatccatcgtgccgcgcgtcggcgagtcctgttgatgcgccacacattccgcaggcatcgtgaacgcttgacagccgtcgccattgtcgcgcacaaaccgcacgtcgattcgtga

SEQ ID NO: 742 - protein, 280 aa, Mycobacterium tuberculosis
KPAEVGSMANKRGNAGQPLPLSDRDDDHMQGHWLLARLGKRVLRPGGVELTRTLLARAEVTDADVLELAPGLGRTAAEILARNPRSYVGAESDPNAANLVRHVLAGRGDVRVTDAADTGLSDASADVVIGEAMLTMQGNAAKHTIVAEAARVLRPGGRYAIHELALVPDDVAEQVRTDLRQSLARALKVNARPLTVAEWSHLLAGHGLVVEHVVTASMALLQPRRVIADEGLLGALRFAGNLLIHRAARRRVLLMRHTFRRHRERLTAVAIVAHKPHVDS

SEQ ID NO: 743 - DNA, 300 bp, Mycobacterium tuberculosis
  CDS (1)..(93)
  CDS (97)..(300)
atcgcgcgtgacatcgatgaccagggtcggctgtgtctggacgtcggcggtcgaacggtagttgtttcagcgggcgacgtggtgcatttgcgttaactcgcgcggagctggcgtccccaaaagattaaggtcgcgggcatgagctatccggagaatgtcctggccgctggcgagcaggtcgttctgcaccgccatccgcactggaatcgcttaatctggcccgtcgtggtgctggtcttgctgaccgggttggcggcgttcgggtccggattcgtcaactcgacaccttggcagcagatc

SEQ ID NO: 744 - protein, 31 aa, Mycobacterium tuberculosis
IARDIDDQGRLCLDVGGRTVVVSAGDVVHLR

SEQ ID NO: 745 - protein, 68 aa, Mycobacterium tuberculosis
LARSWRPQKIKVAGMSYPENVLAAGEQVVLHRHPHWNRLIWPVVVLVLLTGLAAFGSGFVNSTPWQQI

SEQ ID NO: 746 - DNA, 299 bp, Mycobacterium tuberculosis
  CDS (1)..(57)
  CDS (61)..(138)
  CDS (142)..(210)
  CDS (214)..(240)
  CDS (244)..(297)
tcgcgcgtgacatcgatgaccagggtcggctgtgtctggacgtcggcggtcgaacggtagttgtttcagcgggcgacgtggtgcatttgcgttaactcgcgcggagctggcgtccccaaaagattaaggtcgcgggcatgagctatccggagaatgtcctggccgctggcgagcaggtcgttctgcaccgccatccgcactggaatcgcttaatctggcccgtcgtggtgctggtcttgctgaccgggttggcggcgttcgggtccggattcgtcaactcgacaccttggcagcagatc

SEQ ID NO: 747 - protein, 19 aa, Mycobacterium tuberculosis
SRVTSMTRVGCVWTSAVER

SEQ ID NO: 748 - protein, 26 aa, Mycobacterium tuberculosis
LFQRATWCICVNSRGAGVPKRLRSRA

SEQ ID NO: 749 - protein, 23 aa, Mycobacterium tuberculosis
AIRRMSWPLASRSFCTAIRTGIA

SEQ ID NO: 750 - protein, 9 aa, Mycobacterium tuberculosis
SGPSWCWSC

SEQ ID NO: 751 - protein, 18 aa, Mycobacterium tuberculosis
PGWRRSGPDSSTRHLGSR

SEQ ID NO: 752 - DNA, 298 bp, Mycobacterium tuberculosis
  CDS (1)..(6)
  CDS (10)..(15)
  CDS (19)..(123)
  CDS (127)..(297)
cgcgcgtgacatcgatgaccagggtcggctgtgtctggacgtcggcggtcgaacggtagttgtttcagcgggcgacgtggtgcatttgcgttaactcgcgcggagctggcgtccccaaaagattaaggtcgcgggcatgagctatccggagaatgtcctggccgctggcgagcaggtcgttctgcaccgccatccgcactggaatcgcttaatctggcccgtcgtggtgctggtcttgctgaccgggttggcggcgttcgggtccggattcgtcaactcgacaccttggcagcagatc

SEQ ID NO: 753 - protein, 35 aa, Mycobacterium tuberculosis
PGSAVSGRRRSNGSCFSGRRGAFALTRAELASPKD

SEQ ID NO: 754 - protein, 57 aa, Mycobacterium tuberculosis
GRGHELSGECPGRWRAGRSAPPSALESLNLARRGAGLADRVGGVRVRIRQLDTLAAD

SEQ ID NO: 755 - DNA, 519 bp, Mycobacterium tuberculosis
  CDS (1)..(516)
atgagctatccggagaatgtcctggccgctggcgagcaggtcgttctgcaccgccatccgcactggaatcgcttaatctggcccgtcgtggtgctggtcttgctgaccgggttggcggcgttcgggtccggattcgtcaactcgacaccttggcagcagatcgctaagaacgtgattcacgcggtcatctgggggatctggttggtgatcgtcggctggctcacgctgtggccattcctgagctggctgaccacacatttcgtggtgaccaaccggcgggtgatgttccggcatggtgtgctgacccgcagcgggatcgacataccgctagcacggatcaacagcgtggagttccgggaccggatcttcgagcggatttttcgcaccgggacgttgattatcgagtccgcgtcacaagatccgctcgagttctacaacattccgcgcctgcgggaggtgcatgcgttgctgtatcacgaggttttcgacaccctgggctccgacgagtcgcccagctga

SEQ ID NO: 756 - protein, 172 aa, Mycobacterium tuberculosis
MSYPENVLAAGEQVVLHRHPHWNRLIWPVVVLVLLTGLAAFGSGFVNSTPWQQIAKNVIHAVIWGIWLVIVGWLTLWPFLSWLTTHFVVTNRRVMFRHGVLTRSGIDIPLARINSVEFRDRIFERIFRTGTLIIESASQDPLEFYNIPRLREVHALLYHEVFDTLGSDESPS

SEQ ID NO: 757 - DNA, 564 bp, Mycobacterium tuberculosis
  CDS (4)..(561)
taactcgcgcggagctggcgtccccaaaagattaaggtcgcgggcatgagctatccggagaatgtcctggccgctggcgagcaggtcgttctgcaccgccatccgcactggaatcgcttaatctggcccgtcgtggtgctggtcttgctgaccgggttggcggcgttcgggtccggattcgtcaactcgacaccttggcagcagatcgctaagaacgtgattcacgcggtcatctgggggatctggttggtgatcgtcggctggctcacgctgtggccattcctgagctggctgaccacacatttcgtggtgaccaaccggcgggtgatgttccggcatggtgtgctgacccgcagcgggatcgacataccgctagcacggatcaacagcgtggagttccgggaccggatcttcgagcggatttttcgcaccgggacgttgattatcgagtccgcgtcacaagatccgctcgagttctacaacattccgcgcctgcgggaggtgcatgcgttgctgtatcacgaggttttcgacaccctgggctccgacgagtcgcccagctga

SEQ ID NO: 758 - protein, 186 aa, Mycobacterium tuberculosis
LARSWRPQKIKVAGMSYPENVLAAGEQVVLHRHPHWNRLIWPVVVLVLLTGLAAFGSGFVNSTPWQQIAKNVIHAVIWGIWLVIVGWLTLWPFLSWLTTHFVVTNRRVMFRHGVLTRSGIDIPLARINSVEFRDRIFERIFRTGTLIIESASQDPLEFYNIPRLREVHALLYHEVFDTLGSDESPS

SEQ ID NO: 759 - DNA, 429 bp, Mycobacterium tuberculosis
  CDS (1)..(429)
gccaagatggatgtctaccaacgcaccgccgccggctggcagccgctcaagaccggtatcaccacccatatcggttcggcgggcatggcgccggaagccaagagcggatatccggccactccgatgggggtttacagcctggactccgcttttggcaccgcgccgaatcccggtggcgggttgccgtatacccaagtcggacccaatcactggtggagtggcgacgacaatagccccacctttaactccatgcaggtctgtcagaagtcccagtgcccgttcagcacggccgacagcgagaacctgcaaatcccgcagtacaagcattcggtcgtgatgggcgtcaacaaggccaaggtcccaggcaaaggctccgcgttcttctttcacaccaccgacggcgggcccaccgcgggttgtgtggcgatc

SEQ ID NO: 760 - protein, 143 aa, Mycobacterium tuberculosis
AKMDVYQRTAAGWQPLKTGITTHIGSAGMAPEAKSGYPATPMGVYSLDSAFGTAPNPGGGLPYTQVGPNHWWSGDDNSPTFNSMQVCQKSQCPFSTADSENLQIPQYKHSVVMGVNKAKVPGKGSAFFFHTTDGGPTAGCVAI

SEQ ID NO: 761 - DNA, 428 bp, Mycobacterium tuberculosis
  CDS (1)..(333)
  CDS (337)..(426)
ccaagatggatgtctaccaacgcaccgccgccggctggcagccgctcaagaccggtatcaccacccatatcggttcggcgggcatggcgccggaagccaagagcggatatccggccactccgatgggggtttacagcctggactccgcttttggcaccgcgccgaatcccggtggcgggttgccgtatacccaagtcggacccaatcactggtggagtggcgacgacaatagccccacctttaactccatgcaggtctgtcagaagtcccagtgcccgttcagcacggccgacagcgagaacctgcaaatcccgcagtacaagcattcggtcgtgatgggcgtcaacaaggccaaggtcccaggcaaaggctccgcgttcttctttcacaccaccgacggcgggcccaccgcgggttgtgtggcgatc

SEQ ID NO: 762 - protein, 111 aa, Mycobacterium tuberculosis
PRWMSTNAPPPAGSRSRPVSPPISVRRAWRRKPRADIRPLRWGFTAWTPLLAPRRIPVAGCRIPKSDPITGGVATTIAPPLTPCRSVRSPSARSARPTARTCKSRSTSIRS

SEQ ID NO: 763 - protein, 30 aa, Mycobacterium tuberculosis
WASTRPRSQAKAPRSSFTPPTAGPPRVVWR

SEQ ID NO: 764 - DNA, 427 bp, Mycobacterium tuberculosis
  CDS (1)..(228)
  CDS (232)..(240)
  CDS (244)..(426)
caagatggatgtctaccaacgcaccgccgccggctggcagccgctcaagaccggtatcaccacccatatcggttcggcgggcatggcgccggaagccaagagcggatatccggccactccgatgggggtttacagcctggactccgcttttggcaccgcgccgaatcccggtggcgggttgccgtatacccaagtcggacccaatcactggtggagtggcgacgacaatagccccacctttaactccatgcaggtctgtcagaagtcccagtgcccgttcagcacggccgacagcgagaacctgcaaatcccgcagtacaagcattcggtcgtgatgggcgtcaacaaggccaaggtcccaggcaaaggctccgcgttcttctttcacaccaccgacggcgggcccaccgcgggttgtgtggcgatc

SEQ ID NO: 765 - protein, 76 aa, Mycobacterium tuberculosis
QDGCLPTHRRRLAAAQDRYHHPYRFGGHGAGSQERISGHSDGGLQPGLRFWHRAESRWRVAVYPSRTQSLVEWRRQ

SEQ ID NO: 766 - protein, 61 aa, Mycobacterium tuberculosis
LHAGLSEVPVPVQHGRQREPANPAVQAFGRDGRQQGQGPRQRLRVLLSHHRRRAHRGLCGD

SEQ ID NO: 767 - DNA, 657 bp, Mycobacterium tuberculosis
  CDS (1)..(654)
atgagccgactcctagctttgctgtgcgctgcggtatgcacgggctgcgttgctgtggttctcgcgccagtgagcctggccgtcgtcaacccgtggttcgcgaactcggtcggcaatgccactcaggtggtttcggtggtgggaaccggcggttcgacggccaagatggatgtctaccaacgcaccgccgccggctggcagccgctcaagaccggtatcaccacccatatcggttcggcgggcatggcgccggaagccaagagcggatatccggccactccgatgggggtttacagcctggactccgcttttggcaccgcgccgaatcccggtggcgggttgccgtatacccaagtcggacccaatcactggtggagtggcgacgacaatagccccacctttaactccatgcaggtctgtcagaagtcccagtgcccgttcagcacggccgacagcgagaacctgcaaatcccgcagtacaagcattcggtcgtgatgggcgtcaacaaggccaaggtcccaggcaaaggctccgcgttcttctttcacaccaccgacggcgggcccaccgcgggttgtgtggcgatcgacgatgccacgctggtgcagatcatccgttggctgcggcctggtgcggtgatcgcgatcgccaagtaa

SEQ ID NO: 768 - protein, 218 aa, Mycobacterium tuberculosis
MSRLLALLCAAVCTGCVAVVLAPVSLAVVNPWFANSVGNATQVVSVVGTGGSTAKMDVYQRTAAGWQPLKTGITTHIGSAGMAPEAKSGYPATPMGVYSLDSAFGTAPNPGGGLPYTQVGPNHWWSGDDNSPTFNSMQVCQKSQCPFSTADSENLQIPQYKHSVVMGVNKAKVPGKGSAFFFHTTDGGPTAGCVAIDDATLVQIIRWLRPGAVIAIAK

SEQ ID NO: 769 - DNA, 663 bp, Mycobacterium tuberculosis
  CDS (4)..(660)
tgagcgatgagccgactcctagctttgctgtgcgctgcggtatgcacgggctgcgttgctgtggttctcgcgccagtgagcctggccgtcgtcaacccgtggttcgcgaactcggtcggcaatgccactcaggtggtttcggtggtgggaaccggcggttcgacggccaagatggatgtctaccaacgcaccgccgccggctggcagccgctcaagaccggtatcaccacccatatcggttcggcgggcatggcgccggaagccaagagcggatatccggccactccgatgggggtttacagcctggactccgcttttggcaccgcgccgaatcccggtggcgggttgccgtatacccaagtcggacccaatcactggtggagtggcgacgacaatagccccacctttaactccatgcaggtctgtcagaagtcccagtgcccgttcagcacggccgacagcgagaacctgcaaatcccgcagtacaagcattcggtcgtgatgggcgtcaacaaggccaaggtcccaggcaaaggctccgcgttcttctttcacaccaccgacggcgggcccaccgcgggttgtgtggcgatcgacgatgccacgctggtgcagatcatccgttggctgcggcctggtgcggtgatcgcgatcgccaagtaa

SEQ ID NO: 770 - protein, 219 aa, Mycobacterium tuberculosis
AMSRLLALLCAAVCTGCVAVVLAPVSLAVVNPWFANSVGNATQVVSVVGTGGSTAKMDVYQRTAAGWQPLKTGITTHIGSAGMAPEAKSGYPATPMGVYSLDSAFGTAPNPGGGLPYTQVGPNHWWSGDDNSPTFNSMQVCQKSQCPFSTADSENLQIPQYKHSVVMGVNKAKVPGKGSAFFFHTTDGGPTAGCVAIDDATLVQIIRWLRPGAVIAIAK

SEQ ID NO: 771 - DNA, 1492 bp, Mycobacterium tuberculosis
  CDS (1)..(147)
  CDS (151)..(228)
  CDS (232)..(285)
  CDS (289)..(438)
  CDS (442)..(477)
  CDS (481)..(576)
  CDS (580)..(759)
  CDS (763)..(912)
  CDS (916)..(1023)
  CDS (1027)..(1038)
  CDS (1042)..(1186)
  CDS (1190)..(1491)
gatctccccggacaccaggtcatccggcgagatggtgatcgaggctcggacccgcaggcatccggtagccagaggcaccagcatcagcaacatcgcgatggccagcatgccgcgccgtcgggtccttgccactcgcgatccttgggatgacggtggggcatagctagcgcgcaccaggtcatcgtgccagaccgggcatgccgcgtcggcaagctgtcgggcgcgggttagagcggtagcgtgcgacccaggatggcgaatgctcgggggtcaccggcgaagtggtagccgcggatgatgtcggtgaagcccaaccggcggtacaaccgccacgcccgattgtcctcaccgttggtctccggtgtggagagcaggacgttgtcctcgtcgcgaccggctagcagtcggcgggccaacgcctccccgaggccacggccttgagcgcggggaaggatgtgcaattcagtcaactcgaagtagctggtcatcagtcgggcgatcgctaggcgcggaaagccgctgcgttgcaagcccagtaccacctgctgttgccaccactggccgggcgccccgggatagccgtacgccactccgagcattggcgcgttgctcagttcggcggccgacggcagcgccgtggtgtcggcggcctcggcctgttcggctgccgttacctcgacggccgcgaccgcctgccagccgcgccgccggatgtgctccagccacattggggcgcgcaaagtctcggtgcccctggggtagcgcatcgcgtcgacatacaccgtcagggcatcaccgaggcggcgctccatatcgctgggcggcagatcgatgaggaatatcgccaacgcgcggtgtcctcctcatgtgatgaaccgatgcgtgcttgcgcaccagtatcggacaagccgatgaggccgcccgcgctggacggggcttgtagcgtatggccgtttccgctcagctcgtcgctgcggcgccgccgggatagaatcgcccgcgaaccagtggtacggcgcagattgacctcgtatcatctgagttagttgcccgcgcaatgggcatccgcgtgttatcggtattacgtgacagtctgtcggcaaggagggacgcatgccactctccgatcatgagcagcggatgcttgaccagatcgagagcgctctctacgccgaagatcccaagttcgcatcgagtgtccgtggcgggggcttccgcgcaccgaccgcgcggcggcgcctgcagggcgcggcgttgttcatcatcggtctggggatgttggtttccggcgtggcgttcaaagagaccatgatcggaagtttcccgatactcagcgttttcggttttgtcgtgatgttcggtggtgtggtgtatgccatcaccggtcctcggttgtccggcaggatggatcgtggcggatcggctgctggggcttcgcgccagcgtcgtaccaagggggccgggggctcattcaccagccgtatggaagatc

SEQ ID NO: 772 - protein, 49 aa, Mycobacterium tuberculosis
DLPGHQVIRRDGDRGSDPQASGSQRHQHQQHRDGQHAAPSGPCHSRSLG

SEQ ID NO: 773 - protein, 26 aa, Mycobacterium tuberculosis
RWGIASAHQVIVPDRACRVGKLSGAG

SEQ ID NO: 774 - protein, 18 aa, Mycobacterium tuberculosis
SGSVRPRMANARGSPAKW

SEQ ID NO: 775 - protein, 50 aa, Mycobacterium tuberculosis
PRMMSVKPNRRYNRHARLSSPLVSGVESRTLSSSRPASSRRANASPRPRP

SEQ ID NO: 776 - protein, 12 aa, Mycobacterium tuberculosis
ARGRMCNSVNSK

SEQ ID NO: 777 - protein, 32 aa, Mycobacterium tuberculosis
LVISRAIARRGKPLRCKPSTTCCCHHWPGAPG

SEQ ID NO: 778 - protein, 60 aa, Mycobacterium tuberculosis
PYATPSIGALLSSAADGSAVVSAASACSAAVTSTAATACQPRRRMCSSHIGARKVSVPLG

SEQ ID NO: 779 - protein, 50 aa, Mycobacterium tuberculosis
RIASTYTVRASPRRRSISLGGRSMRNIANARCPPHVMNRCVLAHQYRTSR

SEQ ID NO: 780 - protein, 36 aa, Mycobacterium tuberculosis
GRPRWTGLVAYGRFRSARRCGAAGIESPANQWYGAD

SEQ ID NO: 781 - protein, 4 aa, Mycobacterium tuberculosis
PRII

SEQ ID NO: 782 - protein, 15 aa, Mycobacterium tuberculosis
VSCPRNGHPRVIGIT

SEQ ID NO: 783 - protein, 134 aa, Mycobacterium tuberculosis; identical to SEQ ID NO: 599

SEQ ID NO: 784 - DNA, 1491 bp, Mycobacterium tuberculosis
  CDS (1)..(159)
  CDS (163)..(294)
  CDS (298)..(303)
  CDS (307)..(831)
  CDS (835)..(867)
  CDS (874)..(939)
  CDS (943)..(987)
  CDS (991)..(1308)
  CDS (1312)..(1350)
  CDS (1354)..(1491)
atctccccggacaccaggtcatccggcgagatggtgatcgaggctcggacccgcaggcatccggtagccagaggcaccagcatcagcaacatcgcgatggccagcatgccgcgccgtcgggtccttgccactcgcgatccttgggatgacggtggggcatagctagcgcgcaccaggtcatcgtgccagaccgggcatgccgcgtcggcaagctgtcgggcgcgggttagagcggtagcgtgcgacccaggatggcgaatgctcgggggtcaccggcgaagtggtagccgcggatgatgtcggtgaagcccaaccggcggtacaaccgccacgcccgattgtcctcaccgttggtctccggtgtggagagcaggacgttgtcctcgtcgcgaccggctagcagtcggcgggccaacgcctccccgaggccacggccttgagcgcggggaaggatgtgcaattcagtcaactcgaagtagctggtcatcagtcgggcgatcgctaggcgcggaaagccgctgcgttgcaagcccagtaccacctgctgttgccaccactggccgggcgccccgggatagccgtacgccactccgagcattggcgcgttgctcagttcggcggccgacggcagcgccgtggtgtcggcggcctcggcctgttcggctgccgttacctcgacggccgcgaccgcctgccagccgcgccgccggatgtgctccagccacattggggcgcgcaaagtctcggtgcccctggggtagcgcatcgcgtcgacatacaccgtcagggcatcaccgaggcggcgctccatatcgctgggcggcagatcgatgaggaatatcgccaacgcgcggtgtcctcctcatgtgatgaaccgatgcgtgcttgcgcaccagtatcggacaagccgatgaggccgcccgcgctggacggggcttgtagcgtatggccgtttccgctcagctcgtcgctgcggcgccgccgggatagaatcgcccgcgaaccagtggtacggcgcagattgacctcgtatcatctgagttagttgcccgcgcaatgggcatccgcgtgttatcggtattacgtgacagtctgtcggcaaggagggacgcatgccactctccgatcatgagcagcggatgcttgaccagatcgagagcgctctctacgccgaagatcccaagttcgcatcgagtgtccgtggcgggggcttccgcgcaccgaccgcgcggcggcgcctgcagggcgcggcgttgttcatcatcggtctggggatgttggtttccggcgtggcgttcaaagagaccatgatcggaagtttcccgatactcagcgttttcggttttgtcgtgatgttcggtggtgtggtgtatgccatcaccggtcctcggttgtccggcaggatggatcgtggcggatcggctgctggggcttcgcgccagcgtcgtaccaagggggccgggggctcattcaccagccgtatggaagatc

SEQ ID NO: 785 - protein, 53 aa, Mycobacterium tuberculosis
ISPDTRSSGEMVIEARTRRHPVARGTSISNIAMASMPRRRVLATRDPWDDGGA

SEQ ID NO: 786 - protein, 44 aa, Mycobacterium tuberculosis
LARTRSSCQTGHAASASCRARVRAVACDPGWRMLGGHRRSGSRG

SEQ ID NO: 787 - protein, 175 aa, Mycobacterium tuberculosis
SPTGGTTATPDCPHRWSPVWRAGRCPRRDRLAVGGPTPPRGHGLERGEGCAIQSTRSSWSSVGRSLGAESRCVASPVPPAVATTGRAPRDSRTPLRALARCSVRRPTAAPWCRRPRPVRLPLPRRPRPPASRAAGCAPATLGRAKSRCPWGSASRRHTPSGHHRGGAPYRWAADR

SEQ ID NO: 788 - protein, 11 aa, Mycobacterium tuberculosis
GISPTRGVLLM

SEQ ID NO: 789 - protein, 22 aa, Mycobacterium tuberculosis
TDACLRTSIGQADEAARAGRGL

SEQ ID NO: 790 - protein, 15 aa, Mycobacterium tuberculosis
RMAVSAQLVAAAPPG

SEQ ID NO: 791 - protein, 106 aa, Mycobacterium tuberculosis
NRPRTSGTAQIDLVSSELVARAMGIRVLSVLRDSLSARRDACHSPIMSSGCLTRSRALSTPKIPSSHRVSVAGASAHRPRGGACRARRCSSSVWGCWFPAWRSKRP

SEQ ID NO: 792 - protein, 13 aa, Mycobacterium tuberculosis
SEVSRYSAFSVLS

SEQ ID NO: 793 - protein, 46 aa, Mycobacterium tuberculosis; identical to SEQ ID NO: 603

SEQ ID NO: 794 - DNA, 1490 bp, Mycobacterium tuberculosis
  CDS (1)..(33)
  CDS (37)..(63)
  CDS (67)..(162)
  CDS (166)..(234)
  CDS (238)..(396)
  CDS (400)..(501)
  CDS (505)..(1141)
  CDS (1045)..(1128)
  CDS (1132)..(1143)
  CDS (1147)..(1488)
tctccccggacaccaggtcatccggcgagatggtgatcgaggctcggacccgcaggcatccggtagccagaggcaccagcatcagcaacatcgcgatggccagcatgccgcgccgtcgggtccttgccactcgcgatccttgggatgacggtggggcatagctagcgcgcaccaggtcatcgtgccagaccgggcatgccgcgtcggcaagctgtcgggcgcgggttagagcggtagcgtgcgacccaggatggcgaatgctcgggggtcaccggcgaagtggtagccgcggatgatgtcggtgaagcccaaccggcggtacaaccgccacgcccgattgtcctcaccgttggtctccggtgtggagagcaggacgttgtcctcgtcgcgaccggctagcagtcggcgggccaacgcctccccgaggccacggccttgagcgcggggaaggatgtgcaattcagtcaactcgaagtagctggtcatcagtcgggcgatcgctaggcgcggaaagccgctgcgttgcaagcccagtaccacctgctgttgccaccactggccgggcgccccgggatagccgtacgccactccgagcattggcgcgttgctcagttcggcggccgacggcagcgccgtggtgtcggcggcctcggcctgttcggctgccgttacctcgacggccgcgaccgcctgccagccgcgccgccggatgtgctccagccacattggggcgcgcaaagtctcggtgcccctggggtagcgcatcgcgtcgacatacaccgtcagggcatcaccgaggcggcgctccatatcgctgggcggcagatcgatgaggaatatcgccaacgcgcggtgtcctcctcatgtgatgaaccgatgcgtgcttgcgcaccagtatcggacaagccgatgaggccgcccgcgctggacggggcttgtagcgtatggccgtttccgctcagctcgtcgctgcggcgccgccgggatagaatcgcccgcgaaccagtggtacggcgcagattgacctcgtatcatctgagttagttgcccgcgcaatgggcatccgcgtgttatcggtattacgtgacagtctgtcggcaaggagggacgcatgccactctccgatcatgagcagcggatgcttgaccagatcgagagcgctctctacgccgaagatcccaagttcgcatcgagtgtccgtggcgggggcttccgcgcaccgaccgcgcggcggcgcctgcagggcgcggcgttgttcatcatcggtctggggatgttggtttccggcgtggcgttcaaagagaccatgatcggaagtttcccgatactcagcgttttcggttttgtcgtgatgttcggtggtgtggtgtatgccatcaccggtcctcggttgtccggcaggatggatcgtggcggatcggctgctggggcttcgcgccagcgtcgtaccaagggggccgggggctcattcaccagccgtatggaagatc

SEQ ID NO: 795 - protein, 11 aa, Mycobacterium tuberculosis
SPRTPGHPARW

SEQ ID NO: 796 - protein, 9 aa, Mycobacterium tuberculosis
SRLGPAGIR

SEQ ID NO: 797 - protein, 32 aa, Mycobacterium tuberculosis
PEAPASATSRWPACRAVGSLPLAILGMTVGHS

SEQ ID NO: 798 - protein, 23 aa, Mycobacterium tuberculosis
RAPGHRARPGMPRRQAVGRGLER

SEQ ID NO: 799 - protein, 53 aa, Mycobacterium tuberculosis
RATQDGECSGVTGEVVAADDVGEAQPAVQPPRPIVLTVGLRCGEQDVVLVATG

SEQ ID NO: 800 - protein, 34 aa, Mycobacterium tuberculosis
QSAGQRLPEATALSAGKDVQFSQLEVAGHQSGDR

SEQ ID NO: 801 - protein, 179 aa, Mycobacterium tuberculosis
ARKAAALQAQYHLLLPPLAGRPGIAVRHSEHWRVAQFGGRRQRRGVGGLGLFGCRYLDGRDRLPAAPPDVLQPHWGAQSLGAPGVAHRVDIHRQGITEAALHIAGRQIDEEYRQRAVSSSCDEPMRACAPVSDKPMRPPALDGACSVWPFPLSSSLRRRRDRIAREPVVRRRLTSYHLS

SEQ ID NO: 802 - protein, 28 aa, Mycobacterium tuberculosis
LPAQWASACYRYYVTVCRQGGTHATLRS

SEQ ID NO: 803 - protein, 4 aa, Mycobacterium tuberculosis
AADA

SEQ ID NO: 804 - protein, 114 aa, Mycobacterium tuberculosis; identical to SEQ ID NO: 607

SEQ ID NO: 805 - DNA, 403 bp, Mycobacterium tuberculosis; identical to SEQ ID NO: 598
  CDS (1)..(402)

SEQ ID NO: 806 - protein, 134 aa, Mycobacterium tuberculosis; identical to SEQ ID NO: 599

SEQ ID NO: 807 - DNA, 405 bp, Mycobacterium tuberculosis; identical to SEQ ID NO: 608
  CDS (1)..(402)

SEQ ID NO: 808 - protein, 134 aa, Mycobacterium tuberculosis; identical to SEQ ID NO: 609

SEQ ID NO: 809 - DNA, 432 bp, Mycobacterium tuberculosis; identical to SEQ ID NO: 610
  CDS (4)..(429)

SEQ ID NO: 810 - protein, 142 aa, Mycobacterium tuberculosis; identical to SEQ ID NO: 611

SEQ ID NO: 811 - DNA, 360 bp, Mycobacterium tuberculosis
  CDS (1)..(360)
cagccgcgccgcatcgaccagggcctcacgcccggtcacttctccgcgttcctcaacaattccggtgaacatcgcaccaggttaggcagcaatcccgcggacccgcaccccactcgccgaccggccaactcacagacaccctctacgatgcagggtatgcggacccccagacgccactgccgtcgcatcgccgtcctcgccgccgttagcatcgccgccactgtcgttgccggctgctcgtcgggctcgaagccaagcggcggaccacttccggacgcgaagccgctggtcgaggaggccaccgcgcagaccaaggctctcaagagcgcgcacatggtgctgacggtcaacggcaagatc

SEQ ID NO: 812 - protein, 120 aa, Mycobacterium tuberculosis
QPRRIDQGLTPGHFSAFLNNSGEHRTRLGSNPADPHPTRRPANSQTPSTMQGMRTPRRHCRRIAVLAAVSIAATVVAGCSSGSKPSGGPLPDAKPLVEEATAQTKALKSAHMVLTVNGKI

SEQ ID NO: 813 - DNA, 359 bp, Mycobacterium tuberculosis
  CDS (1)..(81)
  CDS (85)..(339)
  CDS (343)..(357)
agccgcgccgcatcgaccagggcctcacgcccggtcacttctccgcgttcctcaacaattccggtgaacatcgcaccaggttaggcagcaatcccgcggacccgcaccccactcgccgaccggccaactcacagacaccctctacgatgcagggtatgcggacccccagacgccactgccgtcgcatcgccgtcctcgccgccgttagcatcgccgccactgtcgttgccggctgctcgtcgggctcgaagccaagcggcggaccacttccggacgcgaagccgctggtcgaggaggccaccgcgcagaccaaggctctcaagagcgcgcacatggtgctgacggtcaacggcaagatc

SEQ ID NO: 814 - protein, 27 aa, Mycobacterium tuberculosis
SRAASTRASRPVTSPRSSTIPVNIAPG

SEQ ID NO: 815 - protein, 85 aa, Mycobacterium tuberculosis
AAIPRTRTPLADRPTHRHPLRCRVCGPPDATAVASPSSPPLASPPLSLPAARRARSQAADHFRTRSRWSRRPPRRPRLSRARTWC

SEQ ID NO: 816 - protein, 5 aa, Mycobacterium tuberculosis
RSTAR

SEQ ID NO: 817 - DNA, 358 bp, Mycobacterium tuberculosis
  CDS (1)..(63)
  CDS (67)..(204)
  CDS (208)..(357)
gccgcgccgcatcgaccagggcctcacgcccggtcacttctccgcgttcctcaacaattccggtgaacatcgcaccaggttaggcagcaatcccgcggacccgcaccccactcgccgaccggccaactcacagacaccctctacgatgcagggtatgcggacccccagacgccactgccgtcgcatcgccgtcctcgccgccgttagcatcgccgccactgtcgttgccggctgctcgtcgggctcgaagccaagcggcggaccacttccggacgcgaagccgctggtcgaggaggccaccgcgcagaccaaggctctcaagagcgcgcacatggtgctgacggtcaacggcaagatc

SEQ ID NO: 818 - protein, 21 aa, Mycobacterium tuberculosis
AAPHRPGPHARSLLRVPQQFR

SEQ ID NO: 819 - protein, 46 aa, Mycobacterium tuberculosis
TSHQVRQQSRGPAPHSPTGQLTDTLYDAGYADPQTPLPSHRRPRRR

SEQ ID NO: 820 - protein, 50 aa, Mycobacterium tuberculosis
HRRHCRCRLLVGLEAKRRTTSGREAAGRGGHRADQGSQERAHGADGQRQD

SEQ ID NO: 821 - DNA, 711 bp, Mycobacterium tuberculosis
  CDS (1)..(708)
atgcggacccccagacgccactgccgtcgcatcgccgtcctcgccgccgttagcatcgccgccactgtcgttgccggctgctcgtcgggctcgaagccaagcggcggaccacttccggacgcgaagccgctggtcgaggaggccaccgcgcagaccaaggctctcaagagcgcgcacatggtgctgacggtcaacggcaagatcccgggactgtctctgaagacgctgagcggcgatctcaccaccaaccccaccgccgcgacgggaaacgtcaagctcacgctgggtgggtctgatatcgatgccgacttcgtggtgttcgacgggatcctgtacgccaccctgacgcccaaccagtggagcgatttcggtcccgccgccgacatctacgaccccgcccaggtgctgaatccggataccggcctggccaacgtgctggcgaatttcgccgacgcaaaagccgaagggcgggataccatcaacggccagaacaccatccgcatcagcgggaaggtatcggcacaggcggtgaaccagatagcgccgccgttcaacgcgacgcagccggtgccggcgaccgtctggattcaggagaccggcgatcatcaactggcacaggcccagttggaccgcggctcgggcaattccgtccagatgaccttgtcgaaatggggcgagaaggtccaggtcacgaagcccccggtgagctga

SEQ ID NO: 822 - protein, 236 aa, Mycobacterium tuberculosis
MRTPRRHCRRIAVLAAVSIAATVVAGCSSGSKPSGGPLPDAKPLVEEATAQTKALKSAHMVLTVNGKIPGLSLKTLSGDLTTNPTAATGNVKLTLGGSDIDADFVVFDGILYATLTPNQWSDFGPAADIYDPAQVLNPDTGLANVLANFADAKAEGRDTINGQNTIRISGKVSAQAVNQIAPPFNATQPVPATVWIQETGDHQLAQAQLDRGSGNSVQMTLSKWGEKVQVTKPPVS

SEQ ID NO: 823 - DNA, 1023 bp, Mycobacterium tuberculosis
  CDS (4)..(1020)
tagctcacccaggttggaccggttcagtgtctcggccatcacgtcggcggtgaattggccgtcgggcaatacatcgacgaccgtcagacacacgccgttgacagcgatcgagtcgccgtggccggcgtcggcggtaaccatcggaccgcggatggtcagccgcgccgcatcgaccagggcctcacgcccggtcacttctccgcgttcctcaacaattccggtgaacatcgcaccaggttaggcagcaatcccgcggacccgcaccccactcgccgaccggccaactcacagacaccctctacgatgcagggtatgcggacccccagacgccactgccgtcgcatcgccgtcctcgccgccgttagcatcgccgccactgtcgttgccggctgctcgtcgggctcgaagccaagcggcggaccacttccggacgcgaagccgctggtcgaggaggccaccgcgcagaccaaggctctcaagagcgcgcacatggtgctgacggtcaacggcaagatcccgggactgtctctgaagacgctgagcggcgatctcaccaccaaccccaccgccgcgacgggaaacgtcaagctcacgctgggtgggtctgatatcgatgccgacttcgtggtgttcgacgggatcctgtacgccaccctgacgcccaaccagtggagcgatttcggtcccgccgccgacatctacgaccccgcccaggtgctgaatccggataccggcctggccaacgtgctggcgaatttcgccgacgcaaaagccgaagggcgggataccatcaacggccagaacaccatccgcatcagcgggaaggtatcggcacaggcggtgaaccagatagcgccgccgttcaacgcgacgcagccggtgccggcgaccgtctggattcaggagaccggcgatcatcaactggcacaggcccagttggaccgcggctcgggcaattccgtccagatgaccttgtcgaaatggggcgagaaggtccaggtcacgaagcccccggtgagctga

SEQ ID NO: 824 - protein, 339 aa, Mycobacterium tuberculosis
LTQVGPVQCLGHHVGGELAVGQYIDDRQTHAVDSDRVAVAGVGGNHRTADGQPRRIDQGLTPGHFSAFLNNSGEHRTRLGSNPADPHPTRRPANSQTPSTMQGMRTPRRHCRRIAVLAAVSIAATVVAGCSSGSKPSGGPLPDAKPLVEEATAQTKALKSAHMVLTVNGKIPGLSLKTLSGDLTTNPTAATGNVKLTLGGSDIDADFVVFDGILYATLTPNQWSDFGPAADIYDPAQVLNPDTGLANVLANFADAKAEGRDTINGQNTIRISGKVSAQAVNQIAPPFNATQPVPATVWIQETGDHQLAQAQLDRGSGNSVQMTLSKWGEKVQVTKPPVS

SEQ ID NO: 825 - DNA, 358 bp, Mycobacterium tuberculosis
  CDS (1)..(357)
gagctggtcaacggcgccggcatcgacgacgccgccgtcgtgacctgccggccggacagcctggccgatgcccagcagatggtcgaggcggcactgggccgatatggccgtttggacggagtgttggtggcctcgggcagcaaccatgtggcgcccattaccgagatggccgtcgaggacttcgacgctgtgatggacgcgaacgtgcggggtgcctggctggtgtgtcgggcggccggacgggtgctgctcgagcagggtcagggcggcagcgtggtgctggtgtcgtccgttcgcggcgggttgggcaatgccgccggttacagcgcgtactgcccgtcgaaggcgggcaccgatc

SEQ ID NO: 826 - protein, 119 aa, Mycobacterium tuberculosis
ELVNGAGIDDAAVVTCRPDSLADAQQMVEAALGRYGRLDGVLVASGSNHVAPITEMAVEDFDAVMDANVRGAWLVCRAAGRVLLEQGQGGSVVLVSSVRGGLGNAAGYSAYCPSKAGTD

SEQ ID NO: 827 - DNA, 357 bp, Mycobacterium tuberculosis
  CDS (1)..(39)
  CDS (43)..(189)
  CDS (193)..(357)
agctggtcaacggcgccggcatcgacgacgccgccgtcgtgacctgccggccggacagcctggccgatgcccagcagatggtcgaggcggcactgggccgatatggccgtttggacggagtgttggtggcctcgggcagcaaccatgtggcgcccattaccgagatggccgtcgaggacttcgacgctgtgatggacgcgaacgtgcggggtgcctggctggtgtgtcgggcggccggacgggtgctgctcgagcagggtcagggcggcagcgtggtgctggtgtcgtccgttcgcggcgggttgggcaatgccgccggttacagcgcgtactgcccgtcgaaggcgggcaccgatc

SEQ ID NO: 828 - protein, 13 aa, Mycobacterium tuberculosis
SWSTAPASTTPPS

SEQ ID NO: 829 - protein, 49 aa, Mycobacterium tuberculosis
PAGRTAWPMPSRWSRRHWADMAVWTECWWPRAATMWRPLPRWPSRTSTL

SEQ ID NO: 830 - protein, 55 aa, Mycobacterium tuberculosis
WTRTCGVPGWCVGRPDGCCSSRVRAAAWCWCRPFAAGWAMPPVTARTARRRRAPI

SEQ ID NO: 831 - DNA, 356 bp, Mycobacterium tuberculosis
  CDS (1)..(354)
gctggtcaacggcgccggcatcgacgacgccgccgtcgtgacctgccggccggacagcctggccgatgcccagcagatggtcgaggcggcactgggccgatatggccgtttggacggagtgttggtggcctcgggcagcaaccatgtggcgcccattaccgagatggccgtcgaggacttcgacgctgtgatggacgcgaacgtgcggggtgcctggctggtgtgtcgggcggccggacgggtgctgctcgagcagggtcagggcggcagcgtggtgctggtgtcgtccgttcgcggcgggttgggcaatgccgccggttacagcgcgtactgcccgtcgaaggcgggcaccgatc

SEQ ID NO: 832 - protein, 118 aa, Mycobacterium tuberculosis
AGQRRRHRRRRRRDLPAGQPGRCPADGRGGTGPIWPFGRSVGGLGQQPCGAHYRDGRRGLRRCDGRERAGCLAGVSGGRTGAARAGSGRQRGAGVVRSRRVGQCRRLQRVLPVEGGHR

SEQ ID NO: 833 - DNA, 813 bp, Mycobacterium tuberculosis
  CDS (1)..(810)
gtggaggaaatggcgctggctcagcaggtgccgaacctgggtctggcgcgcttcagcgtgcaggacaagtcgatcctgatcaccggcgcgaccggttcgttgggccgagttgccgcccgggcgctggccgacgcgggagcgcggctgacactggccggcggcaactcggccggtctggccgagctggtcaacggcgccggcatcgacgacgccgccgtcgtgacctgccggccggacagcctggccgatgcccagcagatggtcgaggcggcactgggccgatatggccgtttggacggagtgttggtggcctcgggcagcaaccatgtggcgcccattaccgagatggccgtcgaggacttcgacgctgtgatggacgcgaacgtgcggggtgcctggctggtgtgtcgggcggccggacgggtgctgctcgagcagggtcagggcggcagcgtggtgctggtgtcgtccgttcgcggcgggttgggcaatgccgccggttacagcgcgtactgcccgtcgaaggcgggcaccgatctgttggccaagacattggcggccgaatggggcggtcacggcattcgggtgaacgcgctggcgccgacggtgtttcggtccgcggtgaccgagtggatgttcaccgacgatccgaagggccgggccacccgggaggcgatgctcgcccggatcccgttgcgccgcttcgccgaaccggaagacttcgtcggcgccctgatctatctgctcagcgacgcctcgagcttctacaccggccaggtgatgtatctggacggcgggtacaccgcatgctga

SEQ ID NO: 834 - protein, 270 aa, Mycobacterium tuberculosis
VEEMALAQQVPNLGLARFSVQDKSILITGATGSLGRVAARALADAGARLTLAGGNSAGLAELVNGAGIDDAAVVTCRPDSLADAQQMVEAALGRYGRLDGVLVASGSNHVAPITEMAVEDFDAVMDANVRGAWLVCRAAGRVLLEQGQGGSVVLVSSVRGGLGNAAGYSAYCPSKAGTDLLAKTLAAEWGGHGIRVNALAPTVFRSAVTEWMFTDDPKGRATREAMLARIPLRRFAEPEDFVGALIYLLSDASSFYTGQVMYLDGGYTAC

SEQ ID NO: 835 - DNA, 816 bp, Mycobacterium tuberculosis
  CDS (4)..(813)
taggtggaggaaatggcgctggctcagcaggtgccgaacctgggtctggcgcgcttcagcgtgcaggacaagtcgatcctgatcaccggcgcgaccggttcgttgggccgagttgccgcccgggcgctggccgacgcgggagcgcggctgacactggccggcggcaactcggccggtctggccgagctggtcaacggcgccggcatcgacgacgccgccgtcgtgacctgccggccggacagcctggccgatgcccagcagatggtcgaggcggcactgggccgatatggccgtttggacggagtgttggtggcctcgggcagcaaccatgtggcgcccattaccgagatggccgtcgaggacttcgacgctgtgatggacgcgaacgtgcggggtgcctggctggtgtgtcgggcggccggacgggtgctgctcgagcagggtcagggcggcagcgtggtgctggtgtcgtccgttcgcggcgggttgggcaatgccgccggttacagcgcgtactgcccgtcgaaggcgggcaccgatctgttggccaagacattggcggccgaatggggcggtcacggcattcgggtgaacgcgctggcgccgacggtgtttcggtccgcggtgaccgagtggatgttcaccgacgatccgaagggccgggccacccgggaggcgatgctcgcccggatcccgttgcgccgcttcgccgaaccggaagacttcgtcggcgccctgatctatctgctcagcgacgcctcgagcttctacaccggccaggtgatgtatctggacggcgggtacaccgcatgctga

SEQ ID NO: 836 - protein, 270 aa, Mycobacterium tuberculosis; identical to SEQ ID NO: 834

SEQ ID NO: 837 - DNA, 94 bp, Mycobacterium tuberculosis
  CDS (1)..(93)
aggctcatgagcaagacggttctcatccttggcgcgggtgtcggcggcctgaccaccgccgacaccctccgtcaactgctaccacctgaggatc

SEQ ID NO: 838 - protein, 31 aa, Mycobacterium tuberculosis
RLMSKTVLILGAGVGGLTTADTLRQLLPPED

SEQ ID NO: 839 - DNA, 93 bp, Mycobacterium tuberculosis
  CDS (1)..(6)
  CDS (10)..(48)
  CDS (52)..(93)
ggctcatgagcaagacggttctcatccttggcgcgggtgtcggcggcctgaccaccgccgacaccctccgtcaactgctaccacctgaggatc

SEQ ID NO: 840 - protein, 13 aa, Mycobacterium tuberculosis
ARRFSSLARVSAA

SEQ ID NO: 841 - protein, 14 aa, Mycobacterium tuberculosis
PPPTPSVNCYHLRI

SEQ ID NO: 842 - DNA, 92 bp, Mycobacterium tuberculosis
  CDS (1)..(84)
  CDS (88)..(90)
gctcatgagcaagacggttctcatccttggcgcgggtgtcggcggcctgaccaccgccgacaccctccgtcaactgctaccacctgaggatc

SEQ ID NO: 843 - protein, 28 aa, Mycobacterium tuberculosis
AHEQDGSHPWRGCRRPDHRRHPPSTATT

SEQ ID NO: 844 - DNA, 1167 bp, Mycobacterium tuberculosis
  CDS (1)..(1164)
atgagcaagacggttctcatccttggcgcgggtgtcggcggcctgaccaccgccgacaccctccgtcaactgctaccacctgaggatcgaatcatattggtggacaggagctttgacgggacgctgggcttgtcgttgctatgggtgttgcggggctggcggcggcctgacgacgtccgcgtccgccccaccgcggcgtcgctgcccggtgtggaaatggttactgcaaccgtcgcccacattgacatcgcggcccaggtagtgcacaccgacaacagcgtcatcggctatgacgcgttggtgatcgcattaggtgcggcgctgaacaccgacgccgttcccggactgtcggacgcgctcgacgccgacgtcgcgggccagttctacaccctggacggcgcggctgagctgcgtgcgaaggtcgaggcgctcgagcatggccggatcgctgtggctatcgccggggtgccgttcaaatgcccagccgcaccgttcgaagcggcgtttctgatcgccgcccaactcggtgaccgctacgccaccggaaccgtacagatcgacacgttcacgcctgacccgctgccgatgcccgttgcaggtcccgaggtcggcgaggctttggtctcgatgctcaaggatcacggtgtcggcttccatcctcgcaaggccctagctcgcgtcgatgaggccgcaaggacgatgcacttcggtgacggcacgtccgaaccgttcgatctgcttgccgtggtccccccgcacgtgccctccgccgcggcgcggtcagcgggtctcagcgaatccgggtggatacccgtggacccgcgcaccctgtccactagcgccgacaacgtgtgggccatcggcgatgcgaccgtgctgacgctgccgaatggcaaaccgctgcccaaggctgccgtgttcgccgaagcccaggccgcagttgtcgcccacggcgtcgcccgccatctcggttacgacgtagctgagcgccacttcaccggcacgggcgcctgctacgtcgagaccggtgatcaccaggcagccaagggcgacggcgatttcttcgctccgtcggcgccctcggtgacgctgtacccgccgtcgcgggagtttcacgaggagaaggtcgcacaagaactggcctggctgacccgctggaagacgtga

SEQ ID NO: 845 - protein, 388 aa, Mycobacterium tuberculosis
MSKTVLILGAGVGGLTTADTLRQLLPPEDRIILVDRSFDGTLGLSLLWVLRGWRRPDDVRVRPTAASLPGVEMVTATVAHIDIAAQVVHTDNSVIGYDALVIALGAALNTDAVPGLSDALDADVAGQFYTLDGAAELRAKVEALEHGRIAVAIAGVPFKCPAAPFEAAFLIAAQLGDRYATGTVQIDTFTPDPLPMPVAGPEVGEALVSMLKDHGVGFHPRKALARVDEAARTMHFGDGTSEPFDLLAVVPPHVPSAAARSAGLSESGWIPVDPRTLSTSADNVWAIGDATVLTLPNGKPLPKAAVFAEAQAAVVAHGVARHLGYDVAERHFTGTGACYVETGDHQAAKGDGDFFAPSAPSVTLYPPSREFHEEKVAQELAWLTRWKT

SEQ ID NO: 846 - DNA, 1344 bp, Mycobacterium tuberculosis
  CDS (4)..(1341)
tgaacacccgcgccgacgcggcgacaatcgcggaaaaccggtccgcgggaatgctgcgggccatgggccgataatagtttgactgactcggtcagtcaccccaagaccttgcgcaagactgcggcggaatctaatattccaaagatatatggaactcgatgcgaaggaatcaggctcatgagcaagacggttctcatccttggcgcgggtgtcggcggcctgaccaccgccgacaccctccgtcaactgctaccacctgaggatcgaatcatattggtggacaggagctttgacgggacgctgggcttgtcgttgctatgggtgttgcggggctggcggcggcctgacgacgtccgcgtccgccccaccgcggcgtcgctgcccggtgtggaaatggttactgcaaccgtcgcccacattgacatcgcggcccaggtagtgcacaccgacaacagcgtcatcggctatgacgcgttggtgatcgcattaggtgcggcgctgaacaccgacgccgttcccggactgtcggacgcgctcgacgccgacgtcgcgggccagttctacaccctggacggcgcggctgagctgcgtgcgaaggtcgaggcgctcgagcatggccggatcgctgtggctatcgccggggtgccgttcaaatgcccagccgcaccgttcgaagcggcgtttctgatcgccgcccaactcggtgaccgctacgccaccggaaccgtacagatcgacacgttcacgcctgacccgctgccgatgcccgttgcaggtcccgaggtcggcgaggctttggtctcgatgctcaaggatcacggtgtcggcttccatcctcgcaaggccctagctcgcgtcgatgaggccgcaaggacgatgcacttcggtgacggcacgtccgaaccgttcgatctgcttgccgtggtccccccgcacgtgccctccgccgcggcgcggtcagcgggtctcagcgaatccgggtggatacccgtggacccgcgcaccctgtccactagcgccgacaacgtgtgggccatcggcgatgcgaccgtgctgacgctgccgaatggcaaaccgctgcccaaggctgccgtgttcgccgaagcccaggccgcagttgtcgcccacggcgtcgcccgccatctcggttacgacgtagctgagcgccacttcaccggcacgggcgcctgctacgtcgagaccggtgatcaccaggcagccaagggcgacggcgatttcttcgctccgtcggcgccctcggtgacgctgtacccgccgtcgcgggagtttcacgaggagaaggtcgcacaagaactggcctggctgacccgctggaagacgtga

SEQ ID NO: 847 - protein, 446 aa, Mycobacterium tuberculosis
TPAPTRRQSRKTGPRECCGPWADNSLTDSVSHPKTLRKTAAESNIPKIYGTRCEGIRLMSKTVLILGAGVGGLTTADTLRQLLPPEDRIILVDRSFDGTLGLSLLWVLRGWRRPDDVRVRPTAASLPGVEMVTATVAHIDIAAQVVHTDNSVIGYDALVIALGAALNTDAVPGLSDALDADVAGQFYTLDGAAELRAKVEALEHGRIAVAIAGVPFKCPAAPFEAAFLIAAQLGDRYATGTVQIDTFTPDPLPMPVAGPEVGEALVSMLKDHGVGFHPRKALARVDEAARTMHFGDGTSEPFDLLAVVPPHVPSAAARSAGLSESGWIPVDPRTLSTSADNVWAIGDATVLTLPNGKPLPKAAVFAEAQAAVVAHGVARHLGYDVAERHFTGTGACYVETGDHQAAKGDGDFFAPSAPSVTLYPPSREFHEEKVAQELAWLTRWKT

SEQ ID NO: 848 - DNA, 1914 bp, Mycobacterium tuberculosis
  CDS (1)..(60)
  CDS (64)..(126)
  CDS (130)..(147)
  CDS (151)..(183)
  CDS (187)..(207)
  CDS (211)..(273)
  CDS (277)..(372)
  CDS (376)..(390)
  CDS (394)..(471)
  CDS (475)..(501)
  CDS (505)..(603)
  CDS (607)..(738)
  CDS (742)..(795)
  CDS (799)..(849)
  CDS (853)..(1914)
ccatctacaccgctcaacagccgggccagacgctgccggtcggtgctgccgagaaggcggtgatccgtggcgagttgttcatgtcgcggcgcaccaccgccgaccaacgggtgcttgccatccgtctgaccaacggtagttcgctgctgatctccaaaagtctcaagcccaccgaagcagtcatgaacaagctgcgttgggtgctattgatcgtgggtgggatcggggtggcggtcgccgcggtggccggggggatggtcacccgggccgggctgaggccggtgggccgcctcaccgaagcggccgagcgggtggcgcgaaccgacgacctgcggcccatccccgtcttcggcagcgacgaattggccaggctgacagaggcattcaatttaatgctgcgggcgctggccgagtcacgggaacggcaggcaaggctggttaccgacgccggacatgaattgcgtaccccgctaacgtcgctgcgcaccaatgtcgaactcttgatggcctcgatggccccgggggctccgcggctacccaagcaggagatggtcgacctgcgtgccgatgtgctggctcaaatcgaggaattgtccacactggtaggcgatttggtggacctgtcccgaggcgacgccggagaagtggtgcacgagccggtcgacatggctgacgtcgtcgaccgcagcctggagcgggtcaggcggcggcgcaacgatatccttttcgacgtcgaggtgattgggtggcaggtttatggcgataccgctggattgtcgcggatggcgcttaacctgatggacaacgccgcgaagtggagcccgccgggcggccacgtgggtgtcaggctgagccagctcgacgcgtcgcacgctgagctggtggtttccgaccgcggcccgggcattcccgtgcaggagcgccgtctggtgtttgaacggttttaccggtcggcatcggcacgggcgttgccgggttcgggcctcgggttggcgatcgtcaaacaggtggtgctcaaccacggcggattgctgcgcatcgaagacaccgacccaggcggccagccccctggaacgtcgatttacgtgctgctccccggccgtcggatgccgattccgcagcttcccggtgcgacggctggcgctcggagcacggacatcgagaactctcggggttcggcgaacgttatctcagtggaatctcagtccacgcgcgcaacctagttgtgcagttactgttgaaagccacacccatgccagtccacgcatggccaagttggcccgagtagtgggcctagtacaggaagagcaacctagcgacatgacgaatcacccacggtattcgccaccgccgcagcagccgggaaccccaggttatgctcaggggcagcagcaaacgtacagccagcagttcgactggcgttacccaccgtccccgcccccgcagccaacccagtaccgtcaaccctacgaggcgttgggtggtacccggccgggtctgatacctggcgtgattccgaccatgacgccccctcctgggatggttcgccaacgccctcgtgcaggcatgttggccatcggcgcggtgacgatagcggtggtgtccgccggcatcggcggcgcggccgcatccctggtcgggttcaaccgggcacccgccggccccagcggcggcccagtggctgccagcgcggcgccaagcatccccgcagcaaacatgccgccggggtcggtcgaacaggtggcggccaaggtggtgcccagtgtcgtcatgttggaaaccgatctgggccgccagtcggaggagggctccggcatcattctgtctgccgaggggctgatcttgaccaacaaccacgtgatcgcggcggccgccaagcctcccctgggcagtccgccgccgaaaacgacggta

SEQ ID NO: 849 - protein, 20 aa, Mycobacterium tuberculosis
PSTPLNSRARRCRSVLPRRR

SEQ ID NO: 850 - protein, 21 aa, Mycobacterium tuberculosis
SVASCSCRGAPPPTNGCLPSV

SEQ ID NO: 851 - protein, 6 aa, Mycobacterium tuberculosis
PTVVRC

SEQ ID NO: 852 - protein, 11 aa, Mycobacterium tuberculosis
SPKVSSPPKQS

SEQ ID NO: 853 - protein, 7 aa, Mycobacterium tuberculosis
TSCVGCY

SEQ ID NO: 854 - protein, 21 aa, Mycobacterium tuberculosis
SWVGSGWRSPRWPGGWSPGPG

SEQ ID NO: 855 - protein, 32 aa, Mycobacterium tuberculosis
GRWAASPKRPSGWREPTTCGPSPSSAATNWPG

SEQ ID NO: 856 - protein, 5 aa, Mycobacterium tuberculosis
QRHSI

SEQ ID NO: 857 - protein, 26 aa, Mycobacterium tuberculosis
CCGRWPSHGNGRQGWLPTPDMNCVPR

SEQ ID NO: 858 - protein, 9 aa, Mycobacterium tuberculosis
RRCAPMSNS

SEQ ID NO: 859 - protein, 33 aa, Mycobacterium tuberculosis
WPRWPRGLRGYPSRRWSTCVPMCWLKSRNCPHW

SEQ ID NO: 860 - protein, 44 aa, Mycobacterium tuberculosis
AIWWTCPEATPEKWCTSRSTWLTSSTAAWSGSGGGATISFSTSR

SEQ ID NO: 861 - protein, 18 aa, Mycobacterium tuberculosis
LGGRFMAIPLDCRGWRLT

SEQ ID NO: 862 - protein, 17 aa, Mycobacterium tuberculosis
WTTPRSGARRAATWVSG

SEQ ID NO: 863 - protein, 354 aa, Mycobacterium tuberculosis
ASSTRRTLSWWFPTAARAFPCRSAVWCLNGFTGRHRHGRCRVRASGWRSSNRWCSTTADCCASKTPTQAASPLERRFTCCSPAVGCRFRSFPVRRLALGARTSRTLGVRRTLSQWNLSPRAQPSCAVTVESHTHASPRMAKLARVVGLVQEEQPSDMTNHPRYSPPPQQPGTPGYAQGQQQTYSQQFDWRYPPSPPPQPTQYRQPYEALGGTRPGLIPGVIPTMTPPPGMVRQRPRAGMLAIGAVTIAVVSAGIGGAAASLVGFNRAPAGPSGGPVAASAAPSIPAANMPPGSVEQVAAKVVPSVVMLETDLGRQSEEGSGIILSAEGLILTNNHVIAAAAKPPLGSPPPKTTV

SEQ ID NO: 864 - DNA, 1913 bp, Mycobacterium tuberculosis
  CDS (1)..(135)
  CDS (139)..(453)
  CDS (457)..(669)
  CDS (673)..(789)
  CDS (793)..(873)
  CDS (877)..(933)
  CDS (937)..(1284)
  CDS (1288)..(1293)
  CDS (1297)..(1320)
  CDS (1324)..(1497)
  CDS (1501)..(1509)
  CDS (1513)..(1521)
  CDS (1525)..(1584)
  CDS (1588)..(1590)
  CDS (1594)..(1836)
  CDS (1840)..(1842)
  CDS (1846)..(1857)
  CDS (1861)..(1911)
catctacaccgctcaacagccgggccagacgctgccggtcggtgctgccgagaaggcggtgatccgtggcgagttgttcatgtcgcggcgcaccaccgccgaccaacgggtgcttgccatccgtctgaccaacggtagttcgctgctgatctccaaaagtctcaagcccaccgaagcagtcatgaacaagctgcgttgggtgctattgatcgtgggtgggatcggggtggcggtcgccgcggtggccggggggatggtcacccgggccgggctgaggccggtgggccgcctcaccgaagcggccgagcgggtggcgcgaaccgacgacctgcggcccatccccgtcttcggcagcgacgaattggccaggctgacagaggcattcaatttaatgctgcgggcgctggccgagtcacgggaacggcaggcaaggctggttaccgacgccggacatgaattgcgtaccccgctaacgtcgctgcgcaccaatgtcgaactcttgatggcctcgatggccccgggggctccgcggctacccaagcaggagatggtcgacctgcgtgccgatgtgctggctcaaatcgaggaattgtccacactggtaggcgatttggtggacctgtcccgaggcgacgccggagaagtggtgcacgagccggtcgacatggctgacgtcgtcgaccgcagcctggagcgggtcaggcggcggcgcaacgatatccttttcgacgtcgaggtgattgggtggcaggtttatggcgataccgctggattgtcgcggatggcgcttaacctgatggacaacgccgcgaagtggagcccgccgggcggccacgtgggtgtcaggctgagccagctcgacgcgtcgcacgctgagctggtggtttccgaccgcggcccgggcattcccgtgcaggagcgccgtctggtgtttgaacggttttaccggtcggcatcggcacgggcgttgccgggttcgggcctcgggttggcgatcgtcaaacaggtggtgctcaaccacggcggattgctgcgcatcgaagacaccgacccaggcggccagccccctggaacgtcgatttacgtgctgctccccggccgtcggatgccgattccgcagcttcccggtgcgacggctggcgctcggagcacggacatcgagaactctcggggttcggcgaacgttatctcagtggaatctcagtccacgcgcgcaacctagttgtgcagttactgttgaaagccacacccatgccagtccacgcatggccaagttggcccgagtagtgggcctagtacaggaagagcaacctagcgacatgacgaatcacccacggtattcgccaccgccgcagcagccgggaaccccaggttatgctcaggggcagcagcaaacgtacagccagcagttcgactggcgttacccaccgtccccgcccccgcagccaacccagtaccgtcaaccctacgaggcgttgggtggtacccggccgggtctgatacctggcgtgattccgaccatgacgccccctcctgggatggttcgccaacgccctcgtgcaggcatgttggccatcggcgcggtgacgatagcggtggtgtccgccggcatcggcggcgcggccgcatccctggtcgggttcaaccgggcacccgccggccccagcggcggcccagtggctgccagcgcggcgccaagcatccccgcagcaaacatgccgccggggtcggtcgaacaggtggcggccaaggtggtgcccagtgtcgtcatgttggaaaccgatctgggccgccagtcggaggagggctccggcatcattctgtctgccgaggggctgatcttgaccaacaaccacgtgatcgcggcggccgccaagcctcccctgggcagtccgccgccgaaaacgacggta

SEQ ID NO: 865 - protein, 45 aa, Mycobacterium tuberculosis
HLHRSTAGPDAAGRCCREGGDPWRVVHVAAHHRRPTGACHPSDQR

SEQ ID NO: 866 - protein, 105 aa, Mycobacterium tuberculosis
FAADLQKSQAHRSSHEQAALGAIDRGWDRGGGRRGGRGDGHPGRAEAGGPPHRSGRAGGANRRPAAHPRLRQRRIGQADRGIQFNAAGAGRVTGTAGKAGYRRRT

SEQ ID NO: 867 - protein, 71 aa, Mycobacterium tuberculosis
IAYPANVAAHQCRTLDGLDGPGGSAATQAGDGRPACRCAGSNRGIVHTGRRFGGPVPRRRRRSGARAGRHG

SEQ ID NO: 868 - protein, 39 aa, Mycobacterium tuberculosis
RRRPQPGAGQAAAQRYPFRRRGDWVAGLWRYRWIVADGA

SEQ ID NO: 869 - protein, 27 aa, Mycobacterium tuberculosis
PDGQRREVEPAGRPRGCQAEPARRVAR

SEQ ID NO: 870 - protein, 19 aa, Mycobacterium tuberculosis
AGGFRPRPGHSRAGAPSGV

SEQ ID NO: 871 - protein, 116 aa, Mycobacterium tuberculosis
TVLPVGIGTGVAGFGPRVGDRQTGGAQPRRIAAHRRHRPRRPAPWNVDLRAAPRPSDADSAASRCDGWRSEHGHRELSGFGERYLSGISVHARNLVVQLLLKATPMPVHAWPSWPE

SEQ ID NO: 872 - protein, 8 aa, Mycobacterium tuberculosis
YRKSNLAT

SEQ ID NO: 873 - protein, 58 aa, Mycobacterium tuberculosis
RITHGIRHRRSSREPQVMLRGSSKRTASSSTGVTHRPRPRSQPSTVNPTRRWVVPGRV

SEQ ID NO: 874 - protein, 20 aa, Mycobacterium tuberculosis
RPLLGWFANALVQACWPSAR

SEQ ID NO: 875 - protein, 81 aa, Mycobacterium tuberculosis
RWCPPASAARPHPWSGSTGHPPAPAAAQWLPARRQASPQQTCRRGRSNRWRPRWCPVSSCWKPIWAASRRRAPASFCLPRG

SEQ ID NO: 876 - protein, 4 aa, Mycobacterium tuberculosis
PTTT

SEQ ID NO: 877 - protein, 17 aa, Mycobacterium tuberculosis
SRRPPSLPWAVRRRKRR

SEQ ID NO: 878 - DNA, 1912 bp, Mycobacterium tuberculosis
  CDS (1)..(1218)
  CDS (1222)..(1236)
  CDS (1240)..(1311)
  CDS (1315)..(1911)
atctacaccgctcaacagccgggccagacgctgccggtcggtgctgccgagaaggcggtgatccgtggcgagttgttcatgtcgcggcgcaccaccgccgaccaacgggtgcttgccatccgtctgaccaacggtagttcgctgctgatctccaaaagtctcaagcccaccgaagcagtcatgaacaagctgcgttgggtgctattgatcgtgggtgggatcggggtggcggtcgccgcggtggccggggggatggtcacccgggccgggctgaggccggtgggccgcctcaccgaagcggccgagcgggtggcgcgaaccgacgacctgcggcccatccccgtcttcggcagcgacgaattggccaggctgacagaggcattcaatttaatgctgcgggcgctggccgagtcacgggaacggcaggcaaggctggttaccgacgccggacatgaattgcgtaccccgctaacgtcgctgcgcaccaatgtcgaactcttgatggcctcgatggccccgggggctccgcggctacccaagcaggagatggtcgacctgcgtgccgatgtgctggctcaaatcgaggaattgtccacactggtaggcgatttggtggacctgtcccgaggcgacgccggagaagtggtgcacgagccggtcgacatggctgacgtcgtcgaccgcagcctggagcgggtcaggcggcggcgcaacgatatccttttcgacgtcgaggtgattgggtggcaggtttatggcgataccgctggattgtcgcggatggcgcttaacctgatggacaacgccgcgaagtggagcccgccgggcggccacgtgggtgtcaggctgagccagctcgacgcgtcgcacgctgagctggtggtttccgaccgcggcccgggcattcccgtgcaggagcgccgtctggtgtttgaacggttttaccggtcggcatcggcacgggcgttgccgggttcgggcctcgggttggcgatcgtcaaacaggtggtgctcaaccacggcggattgctgcgcatcgaagacaccgacccaggcggccagccccctggaacgtcgatttacgtgctgctccccggccgtcggatgccgattccgcagcttcccggtgcgacggctggcgctcggagcacggacatcgagaactctcggggttcggcgaacgttatctcagtggaatctcagtccacgcgcgcaacctagttgtgcagttactgttgaaagccacacccatgccagtccacgcatggccaagttggcccgagtagtgggcctagtacaggaagagcaacctagcgacatgacgaatcacccacggtattcgccaccgccgcagcagccgggaaccccaggttatgctcaggggcagcagcaaacgtacagccagcagttcgactggcgttacccaccgtccccgcccccgcagccaacccagtaccgtcaaccctacgaggcgttgggtggtacccggccgggtctgatacctggcgtgattccgaccatgacgccccctcctgggatggttcgccaacgccctcgtgcaggcatgttggccatcggcgcggtgacgatagcggtggtgtccgccggcatcggcggcgcggccgcatccctggtcgggttcaaccgggcacccgccggccccagcggcggcccagtggctgccagcgcggcgccaagcatccccgcagcaaacatgccgccggggtcggtcgaacaggtggcggccaaggtggtgcccagtgtcgtcatgttggaaaccgatctgggccgccagtcggaggagggctccggcatcattctgtctgccgaggggctgatcttgaccaacaaccacgtgatcgcggcggccgccaagcctcccctgggcagtccgccgccgaaaacgacggta

SEQ ID NO: 879 - protein, 406 aa, Mycobacterium tuberculosis
IYTAQQPGQTLPVGAAEKAVIRGELFMSRRTTADQRVLAIRLTNGSSLLISKSLKPTEAVMNKLRWVLLIVGGIGVAVAAVAGGMVTRAGLRPVGRLTEAAERVARTDDLRPIPVFGSDELARLTEAFNLMLRALAESRERQARLVTDAGHELRTPLTSLRTNVELLMASMAPGAPRLPKQEMVDLRADVLAQIEELSTLVGDLVDLSRGDAGEVVHEPVDMADVVDRSLERVRRRRNDILFDVEVIGWQVYGDTAGLSRMALNLMDNAAKWSPPGGHVGVRLSQLDASHAELVVSDRGPGIPVQERRLVFERFYRSASARALPGSGLGLAIVKQVVLNHGGLLRIEDTDPGGQPPGTSIYVLLPGRRMPIPQLPGATAGARSTDIENSRGSANVISVESQSTRAT

SEQ ID NO: 880 - protein, 5 aa, Mycobacterium tuberculosis
LCSYC

SEQ ID NO: 881 - protein, 24 aa, Mycobacterium tuberculosis
KPHPCQSTHGQVGPSSGPSTGRAT

SEQ ID NO: 882 - protein, 199 aa, Mycobacterium tuberculosis
RHDESPTVFATAAAAGNPRLCSGAAANVQPAVRLALPTVPAPAANPVPSTLRGVGWYPAGSDTWRDSDHDAPSWDGSPTPSCRHVGHRRGDDSGGVRRHRRRGRIPGRVQPGTRRPQRRPSGCQRGAKHPRSKHAAGVGRTGGGQGGAQCRHVGNRSGPPVGGGLRHHSVCRGADLDQQPRDRGGRQASPGQSAAENDG

SEQ ID NO: 883 - DNA, 1395 bp, Mycobacterium tuberculosis
  CDS (1)..(1392)
atggccaagttggcccgagtagtgggcctagtacaggaagagcaacctagcgacatgacgaatcacccacggtattcgccaccgccgcagcagccgggaaccccaggttatgctcaggggcagcagcaaacgtacagccagcagttcgactggcgttacccaccgtccccgcccccgcagccaacccagtaccgtcaaccctacgaggcgttgggtggtacccggccgggtctgatacctggcgtgattccgaccatgacgccccctcctgggatggttcgccaacgccctcgtgcaggcatgttggccatcggcgcggtgacgatagcggtggtgtccgccggcatcggcggcgcggccgcatccctggtcgggttcaaccgggcacccgccggccccagcggcggcccagtggctgccagcgcggcgccaagcatccccgcagcaaacatgccgccggggtcggtcgaacaggtggcggccaaggtggtgcccagtgtcgtcatgttggaaaccgatctgggccgccagtcggaggagggctccggcatcattctgtctgccgaggggctgatcttgaccaacaaccacgtgatcgcggcggccgccaagcctcccctgggcagtccgccgccgaaaacgacggtaaccttctctgacgggcggaccgcacccttcacggtggtgggggctgaccccaccagtgatatcgccgtcgtccgtgttcagggcgtctccgggctcaccccgatctccctgggttcctcctcggacctgagggtcggtcagccggtgctggcgatcgggtcgccgctcggtttggagggcaccgtgaccacggggatcgtcagcgctctcaaccgtccagtgtcgacgaccggcgaggccggcaaccagaacaccgtgctggacgccattcagaccgacgccgcgatcaaccccggtaactccgggggcgcgctggtgaacatgaacgctcaactcgtcggagtcaactcggccattgccacgctgggcgcggactcagccgatgcgcagagcggctcgatcggtctcggttttgcgattccagtcgaccaggccaagcgcatcgccgacgagttgatcagcaccggcaaggcgtcacatgcctccctgggtgtgcaggtgaccaatgacaaagacaccctgggcgccaagatcgtcgaagtagtggccggtggtgctgccgcgaacgctggagtgccgaagggcgtcgttgtcaccaaggtcgacgaccgcccgatcaacagcgcggacgcgttggttgccgccgtgcggtccaaagcgccgggcgccacggtggcgctaacctttcaggatccctcgggcggtagccgcacagtgcaagtcaccctcggcaaggcggagcagtga

SEQ ID NO: 884 - protein, 464 aa, Mycobacterium tuberculosis
MAKLARVVGLVQEEQPSDMTNHPRYSPPPQQPGTPGYAQGQQQTYSQQFDWRYPPSPPPQPTQYRQPYEALGGTRPGLIPGVIPTMTPPPGMVRQRPRAGMLAIGAVTIAVVSAGIGGAAASLVGFNRAPAGPSGGPVAASAAPSIPAANMPPGSVEQVAAKVVPSVVMLETDLGRQSEEGSGIILSAEGLILTNNHVIAAAAKPPLGSPPPKTTVTFSDGRTAPFTVVGADPTSDIAVVRVQGVSGLTPISLGSSSDLRVGQPVLAIGSPLGLEGTVTTGIVSALNRPVSTTGEAGNQNTVLDAIQTDAAINPGNSGGALVNMNAQLVGVNSAIATLGADSADAQSGSIGLGFAIPVDQAKRIADELISTGKASHASLGVQVTNDKDTLGAKIVEVVAGGAAANAGVPKGVVVTKVDDRPINSADALVAAVRSKAPGATVALTFQDPSGGSRTVQVTLGKAEQ

SEQ ID NO: 885 - DNA, 1812 bp, Mycobacterium tuberculosis
  CDS (4)..(1809)
tgagccagctcgacgcgtcgcacgctgagctggtggtttccgaccgcggcccgggcattcccgtgcaggagcgccgtctggtgtttgaacggttttaccggtcggcatcggcacgggcgttgccgggttcgggcctcgggttggcgatcgtcaaacaggtggtgctcaaccacggcggattgctgcgcatcgaagacaccgacccaggcggccagccccctggaacgtcgatttacgtgctgctccccggccgtcggatgccgattccgcagcttcccggtgcgacggctggcgctcggagcacggacatcgagaactctcggggttcggcgaacgttatctcagtggaatctcagtccacgcgcgcaacctagttgtgcagttactgttgaaagccacacccatgccagtccacgcatggccaagttggcccgagtagtgggcctagtacaggaagagcaacctagcgacatgacgaatcacccacggtattcgccaccgccgcagcagccgggaaccccaggttatgctcaggggcagcagcaaacgtacagccagcagttcgactggcgttacccaccgtccccgcccccgcagccaacccagtaccgtcaaccctacgaggcgttgggtggtacccggccgggtctgatacctggcgtgattccgaccatgacgccccctcctgggatggttcgccaacgccctcgtgcaggcatgttggccatcggcgcggtgacgatagcggtggtgtccgccggcatcggcggcgcggccgcatccctggtcgggttcaaccgggcacccgccggccccagcggcggcccagtggctgccagcgcggcgccaagcatccccgcagcaaacatgccgccggggtcggtcgaacaggtggcggccaaggtggtgcccagtgtcgtcatgttggaaaccgatctgggccgccagtcggaggagggctccggcatcattctgtctgccgaggggctgatcttgaccaacaaccacgtgatcgcggcggccgccaagcctcccctgggcagtccgccgccgaaaacgacggtaaccttctctgacgggcggaccgcacccttcacggtggtgggggctgaccccaccagtgatatcgccgtcgtccgtgttcagggcgtctccgggctcaccccgatctccctgggttcctcctcggacctgagggtcggtcagccggtgctggcgatcgggtcgccgctcggtttggagggcaccgtgaccacggggatcgtcagcgctctcaaccgtccagtgtcgacgaccggcgaggccggcaaccagaacaccgtgctggacgccattcagaccgacgccgcgatcaaccccggtaactccgggggcgcgctggtgaacatgaacgctcaactcgtcggagtcaactcggccattgccacgctgggcgcggactcagccgatgcgcagagcggctcgatcggtctcggttttgcgattccagtcgaccaggccaagcgcatcgccgacgagttgatcagcaccggcaaggcgtcacatgcctccctgggtgtgcaggtgaccaatgacaaagacaccctgggcgccaagatcgtcgaagtagtggccggtggtgctgccgcgaacgctggagtgccgaagggcgtcgttgtcaccaaggtcgacgaccgcccgatcaacagcgcggacgcgttggttgccgccgtgcggtccaaagcgccgggcgccacggtggcgctaacctttcaggatccctcgggcggtagccgcacagtgcaagtcaccctcggcaaggcggagcagtga

SEQ ID NO: 886 - protein, 602 aa, Mycobacterium tuberculosis
ASSTRRTLSWWFPTAARAFPCRSAVWCLNGFTGRHRHGRCRVRASGWRSSNRWCSTTADCCASKTPTQAASPLERRFTCCSPAVGCRFRSFPVRRLALGARTSRTLGVRRTLSQWNLSPRAQPSCAVTVESHTHASPRMAKLARVVGLVQEEQPSDMTNHPRYSPPPQQPGTPGYAQGQQQTYSQQFDWRYPPSPPPQPTQYRQPYEALGGTRPGLIPGVIPTMTPPPGMVRQRPRAGMLAIGAVTIAVVSAGIGGAAASLVGFNRAPAGPSGGPVAASAAPSIPAANMPPGSVEQVAAKVVPSVVMLETDLGRQSEEGSGIILSAEGLILTNNHVIAAAAKPPLGSPPPKTTVTFSDGRTAPFTVVGADPTSDIAVVRVQGVSGLTPISLGSSSDLRVGQPVLAIGSPLGLEGTVTTGIVSALNRPVSTTGEAGNQNTVLDAIQTDAAINPGNSGGALVNMNAQLVGVNSAIATLGADSADAQSGSIGLGFAIPVDQAKRIADELISTGKASHASLGVQVTNDKDTLGAKIVEVVAGGAAANAGVPKGVVVTKVDDRPINSADALVAAVRSKAPGATVALTFQDPSGGSRTVQVTLGKAEQ

SEQ ID NO: 887 - DNA, 1166 bp, Mycobacterium tuberculosis
  CDS (1)..(387)
  CDS (391)..(450)
  CDS (454)..(477)
  CDS (481)..(663)
  CDS (667)..(822)
  CDS (826)..(834)
  CDS (838)..(966)
  CDS (970)..(1164)
gatccggcggggcgggtgtcggcgcaggcgtggctggcggtcacggcggtgcgggcggtgccgccgggctgtggggcgccggcggcggcggtggcaatggcgggaacggcgccgatgccaacatcgtcagcggtggagacggtggcctcggcggtgccggtggcggtggcggatggctctacggcgacggcggggccggcggacacggcggacaaggcgcaatcggcctcggcggcggcgccggcggcgacgggggccagggcggcgccggccgcggactgtggggtactggcggcgccggcggacacggcgggcaaggcggtggtaccgggggcccaccgctgcccggtcaggcaggcatgggcgccgcgggtggcgccggtgggctgatcggcaacggcggggccggcggcgacggcggtgtcggcgcgtccggcggggtcgccggagtaggcggtgccggcgggaacgccatgctgatcgggcacggcggcgccggcggcgccggcggagacagcagtttcgctaatggcgcggccggcggcgcgggcggtgccggagggcacctcttcggcaatggcgggtccggcggccacggcggagccgtcacggccggcaacaccggtatcggtggcgccggcggcgtcggtggggacgccaggctgatcggccacggtggcgccggcggtgccggcggggaccgcgccggagccttggttggccgtgacggcgggcccggtgggaacgggggcgctggcggccagctatacggcaacggcggcgacggcgcccccggcaccggcggaacactgcaggcggcggtgagcggattggtgacggctttgttcggtgcacccggccaacccggcgacaccggccaacccggctagccccgatcaacgagggtttcggtgccggtccggggcatggccatccgctgagctggcgatctggactacgttggtgtagaaaaatcctgccgcccggacccttaaggctgggacaatttctgatagctaccccgacacaggaggttacgggatgagcaattcgcgccgccgctcactcaggtggtcatggttgctgagcgtgctggctgccgtcgggctgggcctggccacggcgccggcccaggcggccccgccggccttgtcgcaggaccggtt

SEQ ID NO: 888 - protein, 129 aa, Mycobacterium tuberculosis
DPAGRVSAQAWLAVTAVRAVPPGCGAPAAAVAMAGTAPMPTSSAVETVASAVPVAVADGSTATAGPADTADKAQSASAAAPAATGARAAPAADCGVLAAPADTAGKAVVPGAHRCPVRQAWAPRVAPVG

SEQ ID NO: 889 - protein, 20 aa, Mycobacterium tuberculosis
SATAGPAATAVSARPAGSPE

SEQ ID NO: 890 - protein, 8 aa, Mycobacterium tuberculosis
AVPAGTPC

SEQ ID NO: 891 - protein, 61 aa, Mycobacterium tuberculosis
SGTAAPAAPAETAVSLMARPAARAVPEGTSSAMAGPAATAEPSRPATPVSVAPAASVGTPG

SEQ ID NO: 892 - protein, 52 aa, Mycobacterium tuberculosis
SATVAPAVPAGTAPEPWLAVTAGPVGTGALAASYTATAATAPPAPAEHCRRR

SEQ ID NO: 893 - protein, 43 aa, Mycobacterium tuberculosis
RLCSVHPANPATPANPASPDQRGFRCRSGAWPSAELAIWTTLV

SEQ ID NO: 894 - protein, 65 aa, Mycobacterium tuberculosis
KNPAARTLKAGTISDSYPDTGGYGMSNSRRRSLRWSWLLSVLAAVGLGLATAPAQAAPPALSQDR

SEQ ID NO: 895 - DNA, 1165 bp, Mycobacterium tuberculosis
  CDS (1)..(525)
  CDS (529)..(723)
  CDS (727)..(1041)
  CDS (1045)..(1083)
  CDS (1087)..(1164)
atccggcggggcgggtgtcggcgcaggcgtggctggcggtcacggcggtgcgggcggtgccgccgggctgtggggcgccggcggcggcggtggcaatggcgggaacggcgccgatgccaacatcgtcagcggtggagacggtggcctcggcggtgccggtggcggtggcggatggctctacggcgacggcggggccggcggacacggcggacaaggcgcaatcggcctcggcggcggcgccggcggcgacgggggccagggcggcgccggccgcggactgtggggtactggcggcgccggcggacacggcgggcaaggcggtggtaccgggggcccaccgctgcccggtcaggcaggcatgggcgccgcgggtggcgccggtgggctgatcggcaacggcggggccggcggcgacggcggtgtcggcgcgtccggcggggtcgccggagtaggcggtgccggcgggaacgccatgctgatcgggcacggcggcgccggcggcgccggcggagacagcagtttcgctaatggcgcggccggcggcgcgggcggtgccggagggcacctcttcggcaatggcgggtccggcggccacggcggagccgtcacggccggcaacaccggtatcggtggcgccggcggcgtcggtggggacgccaggctgatcggccacggtggcgccggcggtgccggcggggaccgcgccggagccttggttggccgtgacggcgggcccggtgggaacgggggcgctggcggccagctatacggcaacggcggcgacggcgcccccggcaccggcggaacactgcaggcggcggtgagcggattggtgacggctttgttcggtgcacccggccaacccggcgacaccggccaacccggctagccccgatcaacgagggtttcggtgccggtccggggcatggccatccgctgagctggcgatctggactacgttggtgtagaaaaatcctgccgcccggacccttaaggctgggacaatttctgatagctaccccgacacaggaggttacgggatgagcaattcgcgccgccgctcactcaggtggtcatggttgctgagcgtgctggctgccgtcgggctgggcctggccacggcgccggcccaggcggccccgccggccttgtcgcaggaccggtt

SEQ ID NO: 896 - protein, 175 aa, Mycobacterium tuberculosis
IRRGGCRRRRGWRSRRCGRCRRAVGRRRRRWQWRERRRCQHRQRWRRWPRRCRWRWRMALRRRRGRRTRRTRRNRPRRRRRRRRGPGRRRPRTVGYWRRRRTRRARRWYRGPTAARSGRHGRRGWRRWADRQRRGRRRRRCRRVRRGRRSRRCRRERHADRARRRRRRRRRQQFR

SEQ ID NO: 897 - protein, 65 aa, Mycobacterium tuberculosis
WRGRRRGRCRRAPLRQWRVRRPRRSRHGRQHRYRWRRRRRWGRQADRPRWRRRCRRGPRRSLGWP

SEQ ID NO: 898 - protein, 105 aa, Mycobacterium tuberculosis
RRARWERGRWRPAIRQRRRRRPRHRRNTAGGGERIGDGFVRCTRPTRRHRPTRLAPINEGFGAGPGHGHPLSWRSGLRWCRKILPPGPLRLGQFLIATPTQEVTG

SEQ ID NO: 899 - protein, 13 aa, Mycobacterium tuberculosis
AIRAAAHSGGHGC

SEQ ID NO: 900 - protein, 26 aa, Mycobacterium tuberculosis
ACWLPSGWAWPRRRPRRPRRPCRRTG

SEQ ID NO: 901 - DNA, 1164 bp, Mycobacterium tuberculosis
  CDS (1)..(885)
  CDS (889)..(936)
  CDS (940)..(990)
  CDS (994)..(1008)
  CDS (1015)..(1164)
tccggcggggcgggtgtcggcgcaggcgtggctggcggtcacggcggtgcgggcggtgccgccgggctgtggggcgccggcggcggcggtggcaatggcgggaacggcgccgatgccaacatcgtcagcggtggagacggtggcctcggcggtgccggtggcggtggcggatggctctacggcgacggcggggccggcggacacggcggacaaggcgcaatcggcctcggcggcggcgccggcggcgacgggggccagggcggcgccggccgcggactgtggggtactggcggcgccggcggacacggcgggcaaggcggtggtaccgggggcccaccgctgcccggtcaggcaggcatgggcgccgcgggtggcgccggtgggctgatcggcaacggcggggccggcggcgacggcggtgtcggcgcgtccggcggggtcgccggagtaggcggtgccggcgggaacgccatgctgatcgggcacggcggcgccggcggcgccggcggagacagcagtttcgctaatggcgcggccggcggcgcgggcggtgccggagggcacctcttcggcaatggcgggtccggcggccacggcggagccgtcacggccggcaacaccggtatcggtggcgccggcggcgtcggtggggacgccaggctgatcggccacggtggcgccggcggtgccggcggggaccgcgccggagccttggttggccgtgacggcgggcccggtgggaacgggggcgctggcggccagctatacggcaacggcggcgacggcgcccccggcaccggcggaacactgcaggcggcggtgagcggattggtgacggctttgttcggtgcacccggccaacccggcgacaccggccaacccggctagccccgatcaacgagggtttcggtgccggtccggggcatggccatccgctgagctggcgatctggactacgttggtgtagaaaaatcctgccgcccggacccttaaggctgggacaatttctgatagctaccccgacacaggaggttacgggatgagcaattcgcgccgccgctcactcaggtggtcatggttgctgagcgtgctggctgccgtcgggctgggcctggccacggcgccggcccaggcggccccgccggccttgtcgcaggaccggtt

SEQ ID NO: 902 - protein, 295 aa, Mycobacterium tuberculosis
SGGAGVGAGVAGGHGGAGGAAGLWGAGGGGGNGGNGADANIVSGGDGGLGGAGGGGGWLYGDGGAGGHGGQGAIGLGGGAGGDGGQGGAGRGLWGTGGAGGHGGQGGGTGGPPLPGQAGMGAAGGAGGLIGNGGAGGDGGVGASGGVAGVGGAGGNAMLIGHGGAGGAGGDSSFANGAAGGAGGAGGHLFGNGGSGGHGGAVTAGNTGIGGAGGVGGDARLIGHGGAGGAGGDRAGALVGRDGGPGGNGGAGGQLYGNGGDGAPGTGGTLQAAVSGLVTALFGAPGQPGDTGQPG

SEQ ID NO: 903 - protein, 16 aa, Mycobacterium tuberculosis
PRSTRVSVPVRGMAIR

SEQ ID NO: 904 - protein, 17 aa, Mycobacterium tuberculosis
AGDLDYVGVEKSCRPDP

SEQ ID NO: 905 - protein, 5 aa, Mycobacterium tuberculosis
GWDNF

SEQ ID NO: 906 - protein, 50 aa, Mycobacterium tuberculosis
LPRHRRLRDEQFAPPLTQVVMVAERAGCRRAGPGHGAGPGGPAGLVAGPV

SEQ ID NO: 907 - DNA, 1068 bp, Mycobacterium tuberculosis
  CDS (1)..(1065)
atgagcaattcgcgccgccgctcactcaggtggtcatggttgctgagcgtgctggctgccgtcgggctgggcctggccacggcgccggcccaggcggccccgccggccttgtcgcaggaccggttcgccgacttccccgcgctgcccctcgacccgtccgcgatggtcgcccaagtggggccacaggtggtcaacatcaacaccaaactgggctacaacaacgccgtgggcgccgggaccggcatcgtcatcgatcccaacggtgtcgtgctgaccaacaaccacgtgatcgcgggcgccaccgacatcaatgcgttcagcgtcggctccggccaaacctacggcgtcgatgtggtcgggtatgaccgcacccaggatgtcgcggtgctgcagctgcgcggtgccggtggcctgccgtcggcggcgatcggtggcggcgtcgcggttggtgagcccgtcgtcgcgatgggcaacagcggtgggcagggcggaacgccccgtgcggtgcctggcagggtggtcgcgctcggccaaaccgtgcaggcgtcggattcgctgaccggtgccgaagagacattgaacgggttgatccagttcgatgccgcgatccagcccggtgattcgggcgggcccgtcgtcaacggcctaggacaggtggtcggtatgaacacggccgcgtccgataacttccagctgtcccagggtgggcagggattcgccattccgatcgggcaggcgatggcgatcgcgggccagatccgatcgggtggggggtcacccaccgttcatatcgggcctaccgccttcctcggcttgggtgttgtcgacaacaacggcaacggcgcacgagtccaacgcgtggtcgggagcgctccggcggcaagtctcggcatctccaccggcgacgtgatcaccgcggtcgacggcgctccgatcaactcggccaccgcgatggcggacgcgcttaacgggcatcatcccggtgacgtcatctcggtgacctggcaaaccaagtcgggcggcacgcgtacagggaacgtgacattggccgagggacccccggcctga

SEQ ID NO: 908 - protein, 355 aa, Mycobacterium tuberculosis
MSNSRRRSLRWSWLLSVLAAVGLGLATAPAQAAPPALSQDRFADFPALPLDPSAMVAQVGPQVVNINTKLGYNNAVGAGTGIVIDPNGVVLTNNHVIAGATDINAFSVGSGQTYGVDVVGYDRTQDVAVLQLRGAGGLPSAAIGGGVAVGEPVVAMGNSGGQGGTPRAVPGRVVALGQTVQASDSLTGAEETLNGLIQFDAAIQPGDSGGPVVNGLGQVVGMNTAASDNFQLSQGGQGFAIPIGQAMAIAGQIRSGGGSPTVHIGPTAFLGLGVVDNNGNGARVQRVVGSAPAASLGISTGDVITAVDGAPINSATAMADALNGHHPGDVISVTWQTKSGGTRTGNVTLAEGPPA

SEQ ID NO: 909 - DNA, 1143 bp, Mycobacterium tuberculosis
  CDS (4)..(1140)
tagaaaaatcctgccgcccggacccttaaggctgggacaatttctgatagctaccccgacacaggaggttacgggatgagcaattcgcgccgccgctcactcaggtggtcatggttgctgagcgtgctggctgccgtcgggctgggcctggccacggcgccggcccaggcggccccgccggccttgtcgcaggaccggttcgccgacttccccgcgctgcccctcgacccgtccgcgatggtcgcccaagtggggccacaggtggtcaacatcaacaccaaactgggctacaacaacgccgtgggcgccgggaccggcatcgtcatcgatcccaacggtgtcgtgctgaccaacaaccacgtgatcgcgggcgccaccgacatcaatgcgttcagcgtcggctccggccaaacctacggcgtcgatgtggtcgggtatgaccgcacccaggatgtcgcggtgctgcagctgcgcggtgccggtggcctgccgtcggcggcgatcggtggcggcgtcgcggttggtgagcccgtcgtcgcgatgggcaacagcggtgggcagggcggaacgccccgtgcggtgcctggcagggtggtcgcgctcggccaaaccgtgcaggcgtcggattcgctgaccggtgccgaagagacattgaacgggttgatccagttcgatgccgcgatccagcccggtgattcgggcgggcccgtcgtcaacggcctaggacaggtggtcggtatgaacacggccgcgtccgataacttccagctgtcccagggtgggcagggattcgccattccgatcgggcaggcgatggcgatcgcgggccagatccgatcgggtggggggtcacccaccgttcatatcgggcctaccgccttcctcggcttgggtgttgtcgacaacaacggcaacggcgcacgagtccaacgcgtggtcgggagcgctccggcggcaagtctcggcatctccaccggcgacgtgatcaccgcggtcgacggcgctccgatcaactcggccaccgcgatggcggacgcgcttaacgggcatcatcccggtgacgtcatctcggtgacctggcaaaccaagtcgggcggcacgcgtacagggaacgtgacattggccgagggacccccggcctga

SEQ ID NO: 910 - protein, 379 aa, Mycobacterium tuberculosis
KNPAARTLKAGTISDSYPDTGGYGMSNSRRRSLRWSWLLSVLAAVGLGLATAPAQAAPPALSQDRFADFPALPLDPSAMVAQVGPQVVNINTKLGYNNAVGAGTGIVIDPNGVVLTNNHVIAGATDINAFSVGSGQTYGVDVVGYDRTQDVAVLQLRGAGGLPSAAIGGGVAVGEPVVAMGNSGGQGGTPRAVPGRVVALGQTVQASDSLTGAEETLNGLIQFDAAIQPGDSGGPVVNGLGQVVGMNTAASDNFQLSQGGQGFAIPIGQAMAIAGQIRSGGGSPTVHIGPTAFLGLGVVDNNGNGARVQRVVGSAPAASLGISTGDVITAVDGAPINSATAMADALNGHHPGDVISVTWQTKSGGTRTGNVTLAEGPPA

SEQ ID NO: 911 - DNA, 30 bp, Artificial Sequence
  Description of Artificial Sequence: Primer
gactgctgcagaaggagaagatccaaatgg

SEQ ID NO: 912 - DNA, 33 bp, Artificial Sequence
  Description of Artificial Sequence: Primer
gactagcggccgcgaattcgtcgacctccgagg

SEQ ID NO: 913 - DNA, 20 bp, Artificial Sequence
  Description of Artificial Sequence: Primer
ccgcggatccggatacgtac

SEQ ID NO: 914 - DNA, 31 bp, Artificial Sequence
  Description of Artificial Sequence: Primer
gactgctgcagtttatttcagccccagagcg

SEQ ID NO: 915 - DNA, 30 bp, Artificial Sequence
  Description of Artificial Sequence: Primer
gtaccagtactgatcacccgtctcccgcac

SEQ ID NO: 916 - DNA, 31 bp, Artificial Sequence
  Description of Artificial Sequence: Primer
agtcaggtacctcgcggaaggggtcagtgcg

SEQ ID NO: 917 - DNA, 31 bp, Artificial Sequence
  Description of Artificial Sequence: Primer
agtgcatgctgctggccgaaccatcagcgac

SEQ ID NO: 918 - DNA, 32 bp, Artificial Sequence
  Description of Artificial Sequence: Primer
cagccagatctgcgggcgccctgcaccgcctg

SEQ ID NO: 919 - DNA, 33 bp, Artificial Sequence
  Description of Artificial Sequence: Primer
ctggtcggtgcgtgcatgctcgcagccggatgc

SEQ ID NO: 920 - DNA, 30 bp, Artificial Sequence
  Description of Artificial Sequence: Primer
ataataccatgggcaagcagctagccgcgc

SEQ ID NO: 921 - DNA, 34 bp, Artificial Sequence
  Description of Artificial Sequence: Primer
atttatagatctctgcttagcaaccttggccgcg

SEQ ID NO: 922 - DNA, 44 bp, Artificial Sequence
  Description of Artificial Sequence: Primer
cgctctggggctcaaataaactgcagaaggagaagatccaaatg

SEQ ID NO: 923 - protein, 134 aa, Mycobacterium tuberculosis
PNTVRGGQAFVPGPASAADRLTEASMLLCQRGLGLDVPALAGPASSKQVELNDSRTETLEPRRRSGHQFDSALWQLKVSCEQPGDRIVGLAINRRLADVDNQLTVGTDLDQGSFVTAGLDADDHRVGHRLRLPF

SEQ ID NO: 924 - protein, 9 aa, Mycobacterium tuberculosis
PGAAWAPTT

SEQ ID NO: 925 - protein, 54 aa, Mycobacterium tuberculosis; identical to SEQ ID NO: 168

SEQ ID NO: 926 - protein, 29 aa, Mycobacterium tuberculosis
SHQPHSYHRACGFMPCIRDRGSRRTRRHT

SEQ ID NO: 927 - protein, 19 aa, Mycobacterium tuberculosis
SRLRRLPCRTDADASFRQP

SEQ ID NO: 928 - protein, 37 aa, Mycobacterium tuberculosis
ARSPPWQLQVLVHIFLSTNQPKRPSGPSTMNSSRRRC

SEQ ID NO: 929 - protein, 6 aa, Mycobacterium tuberculosis
PTCPAS

SEQ ID NO: 930 - protein, 12 aa, Mycobacterium tuberculosis
CPRYRRGCPSSG

SEQ ID NO: 931 - protein, 11 aa, Mycobacterium tuberculosis
GVGTQKHRRSA

SEQ ID NO: 932 - protein, 10 aa, Mycobacterium tuberculosis
RAGCDRCRSR

SEQ ID NO: 933 - protein, 24 aa, Mycobacterium tuberculosis
VRSVRASPTSPPEQVVVDASAMVD

SEQ ID NO: 934 - protein, 5 aa, Artificial Sequence
  Description of Artificial Sequence: Motif
LPISG

SEQ ID NO: 935 - protein, 5 aa, Artificial Sequence
  Description of Artificial Sequence: Motif
  MOD_RES (3): Any amino acid
LPXTG
